(19) United States
(12) Patent Application Publication
(10) Pub. No.: US 2020/0224277 A1
(43) Pub. Date: Jul. 16, 2020

(54) CELL TYPE IDENTIFICATION METHOD AND SYSTEM THEREOF

(71) Applicant: MAO YING GENETECH INC., Taipei City (TW)

(72) Inventor: PEI-ING HWANG, Taipei City (TW)

(21) Appl. No.: 16/631,165

(22) PCT Filed: Jul. 16, 2018
(86) PCT No.: PCT/CN2018/095805

§ 371 Date: Jan. 15, 2020

Related U.S. Application Data
(60) Provisional application No. 62/533,145, filed on Jul. 17, 2017.

(51) Int. Cl. C12Q 1/6886; C12Q 1/6881; C12Q 1/6851; C12Q 1/686; G16B 20/00; G16B 25/10

(52) U.S. Cl. CPC C12Q 1/6886; C12Q 1/6881; C12Q 1/6851; C12Q 2600/158; G16B 20/00; G16B 25/10; C12Q 1/686

(57) ABSTRACT

The present disclosure is related to a developing method of candidate probes and a using method thereof. Specifically, the candidate probes are capable binding specific genes and further identifying a cell type of a tissue. Briefly, the developing method comprises the steps of: (a) using a chip to generate gene expressions of normal samples with known organ; (b) using a processing module to compare the gene expressions of the normal samples; and (c) developing candidate probes based on the previous comparing results. The using method comprises the steps of: (a′) using the previous candidate probes to detect the relative gene expression in a test sample with an unknown cell type; (b′) using a processing module to analysis the score of the test sample; and (c′) further predict the cell type of the test sample. Moreover, the present disclosure further provides a system used to conduct the above method, and the system comprises a detecting chip including an array with the candidate probes and a processing module.

[0001] The present application claims priority to U.S. Provisional Application Ser. No. 62/533,145, filed on Jul. 17, 2017, and PCT Application Serial No. PCT/CN2018/095,805, filed on Jul. 16, 2018, which are hereby incorporated by reference in their entirety.

### FIELD

[0002] The present disclosure relates to a method and a system for identifying a cell type, and more particularly to a method and a system for identifying whether a cell type is a normal/benign cell, a primary tumor cell or a metastatic tumor cell.

### BACKGROUND

[0003] Cancer has become the leading cause of deaths worldwide and has taken away millions of human lives every year during the past decades. (Ferlay J et al 2015). Treatment of cancers often involves costly, lengthy and painful processes. New methods of treatment such as target therapies and immuno-therapies are being promoted while cancer drug development is still strictly regulated by the governments of many countries. The anatomical pathological diagnosis is a subjective and traditional process which involves microscopic inspection of the biopsy slides. The interpretation on the morphology of the biopsies made by a pathologist is based on the pathologist's knowledge and experiences for the specific type of cancer. (Connolly J L et al, 2003) This process is considered the gold standard for cancer diagnosis as there has not been any superior technology available since it was firstly introduced around a century ago.

[0004] Due to the nature of a subjective process, it is not surprising that discrepancies may exist in certain cases when a biopsy slide is inspected by different pathologists. Systematic investigations on the accuracies of cancer diagnosis by anatomic pathology have uncovered significant discrepancy/error rates present in various medical institutes worldwide. (Nguyen et al 2004, Raab et al 2005, Elmore J G et al 2015, Singh H et al, 2007, Khazai L et al 2015, Mehrad M et al. 2015) For example, Raab et al reported 1% to 43% of error frequency in cancer diagnosis with anatomic pathology after reviewing more than a dozen of research articles published from 1984 to 2005. (Raab et al 2005) Having had 115 pathologists reviewing 60 cases of breast cancer biopsy slides, Elmore et al presented a 75.3% of concordance (i.e. 25% of discrepancies) with the previous reference diagnosis. (Elmore J G et al 2015) Nguyen et al found that 44% of the patients with adenocarcinomas of the prostate were changed for the Gleanson score by at least 1 point after second review on their pathological results by genitourinary oncologists. Some of the changes in diagnosis led to changes in treatments. (Nguyen et al 2004).

[0005] To reduce errors, the best solution as recommended by numerous medical institutes including The American Society of Clinical Pathologists is to have the biopsy slides reviewed by more than one pathologist. (John E. et al 2000, Nakhleh R E et al 2016, Middleton L P et al 2014, Leong A S et al 2006) Efforts in amending the procedure of surgical pathology also contributed to reducing diagnosis errors. (Nakhleh R E 2008, Nakhleh et al 2016) Application of immune-histochemical staining of selected marker proteins to the biopsy specimens facilitates cancer diagnosis to identify specific subtypes of a cancer. Despite tremendous efforts have been made to reduce the error rates caused at the surgical pathology, the ultimate solution to enhance the accuracy of cancer diagnosis would be to develop an objective diagnosis system which analyzed the specimen from an aspect other than morphology.

[0006] It is desirable to develop a method and a system to accurately and efficiently diagnosis whether a cell is a normal cell/benign tumor cell, a primary tumor cell or a metastatic tumor cell.

### SUMMARY

[0007] The present disclosure provides a gene-based prediction method with potential application in cancer diagnosis by taking advantage of the tissue-specific gene expression profiles. Also, the present disclosure demonstrates that a normal human tissue from each of the thirty anatomic sites exhibits a specific expression profile of the candidate genes in Table 1. The result was validated with a large scale meta-analysis on nearly eight hundred arrays coming from 61 different research groups and the accuracy of the validation reached 99.2%. Further, the result demonstrates that loss of normal tissue-specific expression profiles was found in those cells which had been transformed into a malignant tumor. Hence, the mathematical relationship (stoichiometry) of the relative expression levels of the candidate genes must be well maintained to ensure normal functioning and morphology of the tissue while the relationship becomes lost when the tissue turned cancerous.

[0008] By analysing meta-data and a number of clinical specimens from liver, the present disclosure demonstrates that the loss of stoichiometry in the expression levels of the marker genes may be a general phenomenon present in cancers. By taking both the clinical data and the computed scores into consideration, it was observed that the degree of deviation from a normal expression profile correlates with the extent of malignancies of a cancer (i.e. the degree of similarity is inversely correlated to the extent of cancer malignancies). Moreover, the present disclosure shows that a cancer can be characterized by using a multi-gene signature, which includes one or more genes in Table 1.

[0009] The present disclosure further provides a method for developing a plurality of candidate probes to identify a normal cell in a mammalian subject. The method includes the following steps: Step (a): using a detecting chip to generate a plurality of gene expression obtained from a standard sample of a subject either having or not having a selected disease, disorder or genetic pathology, and the standard sample is diagnosed with a normal cell of a known tissue; Step (b): using a processing module to compare the plurality of gene expressions to generate a comparison result; and Step (c): based on the comparison result, developing an array containing the plurality of candidate probes, wherein the plurality of candidate probes can bind a plurality of polynucleotide sequences selected from any one of SEQ ID No.1 to 652 or from any fragment of SEQ ID No.1 to 652. The detecting chip is connected (e.g., electrically or wirelessly) to the processing module.

[0010] In one embodiment, the number of candidate probes is about 200. In a preferred embodiment, the number of candidate probes is about 100. In a more preferred embodiment, the number of candidate probes is about 50-60. In the most preferred embodiment, the number of candidate probes is about 25-35.

[0011] In one embodiment, the standard sample includes blood, blood plasma, serum, urine, tissue, cells, organs, seminal fluids or any combination thereof.

[0012] In one embodiment, the selected disease, disorder or genetic disorder includes hematologic malignancies or solid tumors.

[0013] In one embodiment, the length of the candidate probes is about 15 nucleotides.

[0014] In one embodiment, the step (b) in the method for developing a plurality of candidate probes to identify a normal cell in a mammalian subject does not include: comparing the plurality of gene expressions for the standard sample with an abnormal sample of a subject diagnosed with a selected disease, disorder, genetic disorder or any combination thereof.

[0015] In one embodiment, the array in the step (c) of the method for developing a plurality of candidate probes to identify a normal cell in a mammalian subject is developed by applying the following: Pearson's correlation, Spearman's rank correlation, Kendall, k-means, Mahalanobis distance, Hamming distance, Levenshtein distance, Euclidean distances or any combination thereof.

[0016] In one embodiment, the step (c) in the method for developing a plurality of candidate probes to identify a normal cell in a mammalian subject further includes a step (c1): analyzing a correlation factor between an expression of a selected sequence of the plurality of the selected probes and an expression of the plurality of polynucleotide sequences selected from any one of SEQ ID No.1 to 652 or from any fragment of SEQ ID No.1 to 652. In further one embodiment, the correlation factor includes binding affinity.

[0017] The present disclosure also provides a method for characterizing the cell type of a tissue in a mammalian subject. The characterized method includes the following steps: Step (a′): using a detection chip containing the plurality of candidate probes mentioned previously to analyse the expression level of a test sample array obtained from a subject either having or not having a selected disease, disorder, genetic disorder, and the plurality of candidate probes can bind the plurality of polynucleotide sequence selected from any one of SEQ ID No.1 to 652 or from any fragment of SEQ ID No.1 to 652; Step (b′): using a processing module to calculate a score (e.g., a CM score) for the test sample based on the expression level of the array; and Step (c′): using the processing module to predict the cell type for the test sample based on the score (e.g., the CM score).

[0018] In one embodiment, the score used to predict the cell type for the test sample is a similarity or dissimilarity degree.

[0019] In one embodiment, the cell type of the test sample is characterized as a normal cell or a benign tumor cell when the CM score of the test sample is about >0.8.

[0020] In one embodiment, the cell type of the test sample is characterized as a primary tumor cell when the CM score of the test sample is about 0.8-0.3.

[0021] In one embodiment, the cell type of the test sample is characterized as a metastatic tumor cell when the CM score of the test sample is about <0.3.

[0022] In one embodiment, the cell type of the test sample is characterized as a normal cell or a benign tumor cell when the similarity degree of the test sample is about >80%. The cell type of the test sample is characterized as a primary tumor cell when the similarity degree of the test sample is about 30-80%. The cell type of the test sample is characterized as a metastatic tumor cell when the similarity degree of the test sample is about <30%. It is worth to know that the two subjects in comparison is identical when the similarity degree is 100%.

[0023] In one embodiment, the cell type of the test sample is characterized as a normal cell or a benign tumor cell when the dissimilarity degree of the test sample is about <20%. The cell type of the test sample is characterized as a primary tumor cell when the dissimilarity degree of the test sample is about 20-70%. The cell type of the test sample is characterized as a metastatic tumor cell when the dissimilarity degree of the test sample is about >70%. It is worth to know that the two subjects in comparison is identical when the dissimilarity degree is 0%.

[0024] In one embodiment, the test sample includes blood, blood plasma, serum, urine, tissue, cells, organs, seminal fluids or any combination thereof.

[0025] In one embodiment, the score in the step (b′) in the method for characterizing a cell type in a mammalian subject is generated by applying the following: Pearson's correlation coefficient, Spearman's rank correlation coefficient, Kendall, Mahalanobis distance, Euclidean distances or any combination thereof.

[0026] Furthermore, the present disclosure provides a system for characterizing the cell type of a tissue in a mammalian subject, and the system includes a detecting chip and a processing module. The processing module electrically connects to the detecting chip. The detecting chip contains a plurality of candidate probes that can bind a plurality of polynucleotide sequence selected from any one of SEQ ID No.1 to 652 or from any fragment of SEQ ID No.1 to 652. Furthermore, the detecting chip detects the expression level of a test sample array obtained from a subject having a selected disease, disorder, genetic disorder, and the processing module further calculates a CM score of the test sample based on the expression level of the array and then predicts the cell type of the test sample based on the CM score thereof.

[0027] In one embodiment, the number of the plurality of candidate probes in the system is about 200. In a preferred embodiment, the number of the plurality of candidate probes in the system is about 100. In a more preferred embodiment, the number of the plurality of candidate probes in the system is about 50-60. In a most preferred embodiment, the number of the plurality of candidate probes in the system is about 25-35.

[0028] In one embodiment, the test sample in the system includes blood, blood plasma, serum, urine, tissue, cells, organs, seminal fluids or any combination thereof.

[0029] In one embodiment, a length of the candidate probes in the system is at least 15 nucleotides.

[0030] Those and other aspects of the present disclosure may be further clarified by the following descriptions and drawings of preferred embodiments. Although there may be changes or modifications therein, they would not betray the spirit and scope of the novel ideas disclosed in the present disclosure.

### BRIEF DESCRIPTION OF THE DRAWINGS

[0031] One or more embodiments are illustrated by way of examples, and not by limitation, in the figures of the accompanying drawings, wherein elements having the same reference numeral designations represent like elements throughout. It should be understood that the present disclosure is not limited to the preferred embodiments shown. The data in the figures and examples are shown as mean±standard deviation (SD), determined by the paired t-test. Significant differences are shown as follows: *: P<0.05; **: P<0.01.

[0032] FIG. 1 discloses the example candidate genes resulted in complete tissue classification using standard two-way hierarchical clustering analysis. The columns indicate the tissue origins of the samples and the rows indicate the signature genes. The dendrogram shown on top of the heat map indicates the clustering of 30 tissues.

[0033] FIG. 2 discloses candidate genes of the present disclosure differentiating cancer from normal in multiple datasets. The averaged cancer malignancy scores (hereinafter the “CM scores”) of normal samples or tumors were computed for each dataset shown along the x axis. The source organ of the datasets are denoted below the GEO accession number. The open squares (designated N in the upper right corner) indicate the normal samples while the closed circles (designated T) the tumor samples. The means and error bars are shown as grey lines.

[0034] FIG. 3 discloses the distribution of CM scores by individual normal or cancer samples from selected datasets. The GEO accession number of the dataset was marked on top of the corresponding panel. The y axis indicates the CM score, and x axis indicates the category of the sample being normal (open square) or tumor (closed circle). The numerical values alone a grey line of a group of data points indicate the mean value of CM scores of the designated group. P-value was computed based on the one-tailed t-test and was shown as asterix (e.g. **** indicates p<0.0001).

[0035] FIGS. 4A and 4B show the results of the benign tumors or the near-benign cancers with the CM score analyses. FIG. 4A was from GSE33630 which consists of normal thyroid, papillary thyroid cancer (i.e., PTC) and anaplastic thyroid cancer (i.e., ATC). FIG. 4B showed the dataset GSE13319 which contained samples from myometrium (representing normal tissue of uterus, in red asterisk) and leiomyoma (representing a benign tumor from uterus, in open diamond).

[0036] The drawings are only schematic and are non-limiting. Any reference signs in the claims shall not be construed as limiting the scope. Like reference symbols in the various drawings indicate like elements

### DETAILED DESCRIPTION

[0037] Unless defined otherwise, all technical and scientific terms used herein have the same meanings as commonly understood by one of skill in the art to which this disclosure belongs. It will be further understood that terms; such as those defined in commonly used dictionaries, should be interpreted as having a meaning that is consistent with their meaning in the context of the relevant art and the present disclosure, and will not be interpreted in an idealized or overly formal sense unless expressly so defined herein.

[0038] Reference throughout this specification to “one embodiment” or “an embodiment” means that a particular feature, structure, or characteristic described in connection with the embodiment is included in at least one embodiment. Thus, the appearances of the phrases “in one embodiment” or “in an embodiment” in various places throughout this specification are not necessarily all referring to the same embodiment. Furthermore, the particular features, structures, or characteristics may be combined in any suitable manner in one or more embodiments.

### Definition

[0039] Unless clearly specified herein, meanings of the articles “a,” “an,” and “said” all include the plural form of “more than one.” Therefore, for example, when the term “a component” is used, it includes multiple said components and equivalents known to those of common knowledge in said field.

[0040] The term “about” and “around,” as used herein, when referring to a measurable value such as an amount, a temporal duration, and the like, is meant to encompass variations of ±20% or ±10%, more preferably ±5%, even more preferably ±1%, and still more preferably ±0.1% from the specified value, as such variations are appropriate to perform the disclosed methods.

[0041] A “disease” is a state of health of an animal wherein the animal cannot maintain homeostasis, and wherein if the disease is not ameliorated then the animal's health continues to deteriorate. In contrast, a “disorder” in an animal is a state of health in which the animal is able to maintain homeostasis, but in which the animal's state of health is less favorable than it would be in the absence of the disorder. Left untreated, a disorder does not necessarily cause a further decrease in the animal's state of health.

[0042] The term “cancer” and “tumor” as used herein are both defined as a disease characterized by the rapid and uncontrolled growth of aberrant cells. Therefore, the terms of “cancer” and “tumor” are interchangeable. Cancer cells can spread locally or through the bloodstream and lymphatic system to other parts of the body. Examples of various cancers include but are not limited to, breast cancer, prostate cancer, ovarian cancer, cervical cancer, skin cancer, pancreatic cancer, colorectal cancer, renal cancer, liver cancer, brain cancer, lymphoma, leukemia, lung cancer and the like.

[0043] In the context of the present invention, the following abbreviations for the commonly occurring “nucleic acid bases” or “nucleotides” are used, “A” refers to adenosine, “C” refers to cytosine, “G” refers to guanosine, “T” refers to thymidine, and “U” refers to uridine.

[0044] The term “polynucleotide” as used herein is defined as a chain of nucleotides. Furthermore, nucleic acids are polymers of nucleotides. Thus, nucleic acids and polynucleotides as used herein are interchangeable. One skilled in the art has the general knowledge that nucleic acids are polynucleotides, which can be hydrolyzed into the monomeric “nucleotides.” The monomeric nucleotides can be hydrolyzed into nucleosides. As used herein polynucleotides include, but are not limited to, all nucleic acid sequences which are obtained by any means available in the art, including, without limitation, recombinant means, i.e., the cloning of nucleic acid sequences from a recombinant library or a cell genome, using ordinary cloning technology and PCR™, and the like, and by synthetic means.

[0045] The term “candidate probe” and “selected probe” as used herein are both defined as the artificial probes generated by the present disclosure and capable of binding to the genes in Table 1. Therefore, the terms of “candidate probe” and “selected probe” are interchangeable.

TABLE 1
“Genes used as probes for identification”

| Gene sym | SEQID | Gene Title |
|---|---|---|
| FLJ14106 | 1 | Homo sapiens hypothetical protein FLJ14106, |
| | | mRNA″ |
| CSH2 | 2 | Homo sapiens chorionic somatomammotropin |
| | | hormone 2, transcript variant 1, mRNA″ |
| HLA-DRB6 | 3 | Homo sapiens major histocompatibility complex, class |
| | | II, DR beta 6 (pseudogene), non-coding RNA″ |
| WFDC10B | 4 | Homo sapiens WAP four-disulfide core domain 10B, |
| | | transcript variant 1, mRNA″ |
| EXOSC6 | 5 | Homo sapiens exosome component 6, mRNA″ |
| ZNF804A | 6 | Homo sapiens zinc finger protein 804A, mRNA″ |
| PCIF1 | 7 | Homo sapiens PDX1 C-terminal inhibiting factor 1, |
| | | mRNA″ |
| TCEAL2 | 8 | Homo sapiens transcription elongation factor A like 2, |
| | | mRNA″ |
| MS4A1 | 9 | Homo sapiens membrane spanning 4-domains A1, |
| | | transcript variant 3, mRNA″ |
| HOXA9 | 10 | Homo sapiens homeobox A9, mRNA″ |
| TMEM132A | 11 | Homo sapiens transmembrane protein 132A, transcript |
| | | variant 1, mRNA″ |
| ZNF750 | 12 | Homo sapiens zinc finger protein 750, mRNA″ |
| MYL1 | 13 | Homo sapiens myosin light chain 1, transcript variant |
| | | 1f, mRNA″ |
| GPR88 | 14 | Homo sapiens G protein-coupled receptor 88, mRNA″ |
| DNER | 15 | Homo sapiens delta/notch like EGF repeat containing, |
| | | mRNA″ |
| FRY | 16 | Homo sapiens FRY microtubule binding protein, |
| | | mRNA″ |
| SPEF2 | 17 | Homo sapiens sperm flagellar 2, transcript variant 1, |
| | | mRNA″ |
| C16orf54 | 18 | Homo sapiens chromosome 16 open reading frame 54, |
| | | mRNA″ |
| CBARP | 19 | Homo sapiens CACN beta subunit associated |
| | | regulatory protein, mRNA″ |
| PMAIP1 | 20 | Homo sapiens phorbol-12-myristate-13-acetate- |
| | | induced protein 1, mRNA″ |
| PAGR1 | 21 | Homo sapiens PAXIP1 associated glutamate rich |
| | | protein 1, mRNA″ |
| LIX1 | 22 | Homo sapiens limb and CNS expressed 1, mRNA″ |
| CA13 | 23 | Homo sapiens carbonic anhydrase 13, mRNA″ |
| TMPRSS11B | 24 | Homo sapiens transmembrane serine protease 11B, |
| | | mRNA″ |
| CNFN | 25 | Homo sapiens cornifelin, mRNA″ |
| ABRA | 26 | Homo sapiens actin binding Rho activating protein, |
| | | mRNA″ |
| JCHAIN | 27 | Homo sapiens joining chain of multimeric IgA and |
| | | IgM, mRNA″ |
| ZNF791 | 28 | Homo sapiens zinc finger protein 791, mRNA″ |
| ANO1 | 29 | Homo sapiens anoctamin 1, transcript variant 1, |
| | | mRNA″ |
| TMEM144 | 30 | Homo sapiens transmembrane protein 144, mRNA″ |
| NEFH | 31 | Homo sapiens neurofilament heavy, mRNA″ |
| VXN | 32 | Homo sapiens vexin, mRNA″ |
| CRCT1 | 33 | Homo sapiens cysteine rich C-terminal 1, mRNA″ |
| MIR155HG | 34 | Homo sapiens MIR155 host gene, long non-coding |
| | | RNA″ |
| CREG2 | 35 | Homo sapiens cellular repressor of E1A stimulated |
| | | genes 2, mRNA″ |
| TUBB2B | 36 | Homo sapiens tubulin beta 2B class IIb, mRNA″ |
| SLC17A6 | 37 | Homo sapiens solute carrier family 17 member 6, |
| | | mRNA″ |
| PERP | 38 | Homo sapiens PERP, TP53 apoptosis effector, |
| | | mRNA″ |
| TXLNB | 39 | Homo sapiens taxilin beta, mRNA″ |
| LINC01105 | 40 | Homo sapiens long intergenic non-protein coding |
| | | RNA 1105, long non-coding RNA″ |
| PCDH9 | 41 | Homo sapiens protocadherin 9, transcript variant 2, |
| | | mRNA″ |
| GPAT4 | 42 | Homo sapiens glycerol-3-phosphate acyltransferase 4, |
| | | mRNA″ |
| OLIG1 | 43 | Homo sapiens oligodendrocyte transcription factor 1, |
| | | mRNA″ |
| MTERF4 | 44 | Homo sapiens mitochondrial transcription termination |
| | | factor 4, transcript variant 1, mRNA″ |
| LINC00632 | 45 | Homo sapiens long intergenic non-protein coding |
| | | RNA 632, transcript variant 1, long non-coding RNA″ |
| ZC3H12D | 46 | Homo sapiens zinc finger CCCH-type containing 12D, |
| | | mRNA″ |
| C11orf87 | 47 | Homo sapiens chromosome 11 open reading frame 87, |
| | | mRNA″ |
| ASB5 | 48 | Homo sapiens ankyrin repeat and SOCS box |
| | | containing 5, mRNA″ |
| LINC00944 | 49 | Homo sapiens long intergenic non-protein coding |
| | | RNA 944, long non-coding RNA″ |
| RNF144A-AS1 | 50 | Homo sapiens RNF144A antisense RNA 1, long non- |
| | | coding RNA″ |
| UBE2Z | 51 | Homo sapiens ubiquitin conjugating enzyme E2 Z, |
| | | mRNA″ |
| UBAC2-AS1 | 52 | Homo sapiens UBAC2 antisense RNA 1, transcript |
| | | variant 1, long non-coding RNA″ |
| LOC100506965 | 53 | Homo sapiens hypothetical LOC100506965, |
| | | miscRNA″ |
| BRICD5 | 54 | Homo sapiens BRICHOS domain containing 5, |
| | | mRNA″ |
| DSTNP2 | 55 | Homo sapiens destrin, actin depolymerizing factor |
| | | pseudogene 2, non-coding RNA″ |
| MAMDC2-AS1 | 56 | Homo sapiens MAMDC2 antisense RNA 1, long non- |
| | | coding RNA″ |
| MYOZ2 | 57 | Homo sapiens myozenin 2, mRNA″ |
| LRRC2 | 58 | Homo sapiens leucine rich repeat containing 2, |
| | | mRNA″ |
| APOOL | 59 | Homo sapiens apolipoprotein O like, mRNA″ |
| HCN1 | 60 | Homo sapiens hyperpolarization activated cyclic |
| | | nucleotide gated potassium channel 1, mRNA″ |
| TCIM | 61 | Homo sapiens transcriptional and immune response |
| | | regulator, mRNA″ |
| FDCSP | 62 | Homo sapiens follicular dendritic cell secreted protein, |
| | | mRNA″ |
| MTUS2-AS1 | 63 | Homo sapiens MTUS2 antisense RNA 1, long non- |
| | | coding RNA″ |
| XIST | 64 | Homo sapiens X inactive specific transcript (non- |
| | | protein coding), long non-coding RNA″ |
| GATAD1 | 65 | Homo sapiens GATA zinc finger domain containing |
| | | 1, transcript variant 1, mRNA″ |
| C15orf48 | 66 | Homo sapiens chromosome 15 open reading frame 48, |
| | | transcript variant 2, mRNA″ |
| CSGALNACT2 | 67 | Homo sapiens chondroitin sulfate N- |
| | | acetylgalactosaminyltransferase 2, transcript variant 1, |
| | | mRNA″ |
| SOX2-OT | 68 | Homo sapiens SOX2 overlapping transcript, transcript |
| | | variant 4, long non-coding RNA″ |
| C16orf58 | 69 | Homo sapiens chromosome 16 open reading frame 58, |
| | | mRNA″ |
| ACKR4 | 70 | Homo sapiens atypical chemokine receptor 4, |
| | | transcript variant 2, mRNA″ |
| P2RY12 | 71 | Homo sapiens purinergic receptor P2Y12, transcript |
| | | variant 1, mRNA″ |
| LOC101927513 | 72 | Homo sapiens uncharacterized LOC101927513, |
| | | ncRNA″ |
| LOC100507642 | 73 | Homo sapiens uncharacterized LOC100507642, |
| | | transcript variant 1, long non-coding RNA″ |
| LINC00844 | 74 | Homo sapiens long intergenic non-protein coding |
| | | RNA 844, long non-coding RNA″ |
| AMER2 | 75 | Homo sapiens APC membrane recruitment protein 2, |
| | | transcript variant 1, mRNA″ |
| FAM83C-AS1 | 76 | Homo sapiens FAM83C antisense RNA 1, long non- |
| | | coding RNA″ |
| LINC01215 | 77 | Homo sapiens long intergenic non-protein coding |
| | | RNA 1215, transcript variant 1, long non-coding |
| | | RNA″ |
| ANKRD44-IT1 | 78 | Homo sapiens ANKRD44 intronic transcript 1, long |
| | | non-coding RNA″ |
| MIR133A1HG | 79 | Homo sapiens MIR133A1 host gene, long non-coding |
| | | RNA″ |
| LINC01770 | 80 | Homo sapiens long intergenic non-protein coding |
| | | RNA 1770, transcript variant 1, long non-coding |
| | | RNA″ |
| AGR3 | 81 | Homo sapiens anterior gradient 3, protein disulphide |
| | | isomerase family member, mRNA″ |
| DIRAS2 | 82 | Homo sapiens DIRAS family GTPase 2, mRNA″ |
| PCDH10 | 83 | Homo sapiens protocadherin 10, transcript variant 2, |
| | | mRNA″ |
| NEK5 | 84 | Homo sapiens NIMA related kinase 5, mRNA″ |
| PPP3R2 | 85 | Homo sapiens protein phosphatase 3 regulatory |
| | | subunit B, beta, mRNA″ |
| LOC105373660 | 86 | Homo sapiens uncharacterized LOC105373660, |
| | | transcript variant X4, ncRNA″ |
| LOC101930370 | 87 | Homo sapiens uncharacterized LOC101930370, |
| | | transcript variant X1, ncRNA″ |
| TRAT1 | 88 | Homo sapiens T cell receptor associated |
| | | transmembrane adaptor 1, transcript variant 1, |
| | | mRNA″ |
| SPX | 89 | Homo sapiens spexin hormone, transcript variant 1, |
| | | mRNA″ |
| TMTC2 | 90 | Homo sapiens transmembrane and tetratricopeptide |
| | | repeat containing 2, transcript variant 1, mRNA″ |
| VGLL3 | 91 | Homo sapiens vestigial like family member 3, |
| | | transcript variant 1, mRNA″ |
| COL14A1 | 92 | Homo sapiens collagen type XIV alpha 1 chain, |
| | | mRNA″ |
| LOC285556 | 93 | Homo sapiens uncharacterized LOC285556, transcript |
| | | variant X1, mRNA″ |
| ZNF467 | 94 | Homo sapiens zinc finger protein 467, transcript |
| | | variant 1, mRNA″ |
| LMOD2 | 95 | Homo sapiens leiomodin 2, mRNA″ |
| TCEAL7 | 96 | Homo sapiens transcription elongation factor A like 7, |
| | | transcript variant 1, mRNA″ |
| PRPF40A | 97 | Homo sapiens pre-mRNA processing factor 40 |
| | | homolog A, transcript variant 1, mRNA″ |
| ZFAS1 | 98 | Homo sapiens ZNFX1 antisense RNA 1, transcript |
| | | variant 1, long non-coding RNA″ |
| FAM192A | 99 | Homo sapiens family with sequence similarity 192 |
| | | member A, transcript variant 20, mRNA″ |
| LINC00461 | 100 | Homo sapiens long intergenic non-protein coding |
| | | RNA 461, transcript variant 3, long non-coding RNA″ |
| S100A12 | 101 | Homo sapiens S100 calcium binding protein A12, |
| | | mRNA″ |
| MRPS28 | 102 | Homo sapiens mitochondrial ribosomal protein S28, |
| | | mRNA″ |
| ITK | 103 | Homo sapiens IL2 inducible T cell kinase, mRNA″ |
| LHX2 | 104 | Homo sapiens LIM homeobox 2, mRNA″ |
| PELO | 105 | Homo sapiens pelota mRNA surveillance and |
| | | ribosome rescue factor, mRNA″ |
| CDK5R1 | 106 | Homo sapiens cyclin dependent kinase 5 regulatory |
| | | subunit 1, mRNA″ |
| CPLX1 | 107 | Homo sapiens complexin 1, mRNA″ |
| CDC40 | 108 | Homo sapiens cell division cycle 40, mRNA″ |
| PANX1 | 109 | Homo sapiens pannexin 1, mRNA″ |
| CLIC3 | 110 | Homo sapiens chloride intracellular channel 3, |
| | | mRNA″ |
| KLHL41 | 111 | Homo sapiens kelch like family member 41, mRNA″ |
| CDR1 | 112 | Homo sapiens cerebellar degeneration related protein |
| | | 1, mRNA″ |
| MB | 113 | Homo sapiens myoglobin, transcript variant 1, |
| | | mRNA″ |
| S100A2 | 114 | Homo sapiens S100 calcium binding protein A2, |
| | | mRNA″ |
| S100P | 115 | Homo sapiens S100 calcium binding protein P, |
| | | mRNA″ |
| RIMS3 | 116 | Homo sapiens regulating synaptic membrane |
| | | exocytosis 3, mRNA″ |
| PCP4 | 117 | Homo sapiens Purkinje cell protein 4, mRNA″ |
| CFL1 | 118 | Homo sapiens cofilin 1, mRNA″ |
| RBP4 | 119 | Homo sapiens retinol binding protein 4, transcript |
| | | variant 1, mRNA″ |
| MLLT11 | 120 | Homo sapiens MLLT11, transcription factor 7 |
| | | cofactor, mRNA″ |
| CELA2B | 121 | Homo sapiens chymotrypsin like elastase family |
| | | member 2B, mRNA″ |
| CSTA | 122 | Homo sapiens cystatin A, mRNA″ |
| NNMT | 123 | Homo sapiens nicotinamide N-methyltransferase, |
| | | mRNA″ |
| DKK4 | 124 | Homo sapiens dickkopf WNT signaling pathway |
| | | inhibitor 4, mRNA″ |
| KRT7 | 125 | Homo sapiens keratin 7, mRNA″ |
| MEOX2 | 126 | Homo sapiens mesenchyme homeobox 2, mRNA″ |
| CLCA3 | 127 | Homo sapiens chloride channel, calcium activated, |
| | | family member 3, mRNA″ |
| CD96 | 128 | Homo sapiens CD96 molecule, transcript variant 2, |
| | | mRNA″ |
| SMR3B | 129 | Homo sapiens submaxillary gland androgen regulated |
| | | protein 3B, mRNA″ |
| PNLIPRP2 | 130 | Homo sapiens pancreatic lipase related protein 2 |
| | | (gene/pseudogene), transcript variant 1, coding, |
| | | mRNA″ |
| MTF1 | 131 | Homo sapiens metal regulatory transcription factor 1, |
| | | mRNA″ |
| S100B | 132 | Homo sapiens S100 calcium binding protein B, |
| | | mRNA″ |
| MYH1 | 133 | Homo sapiens myosin heavy chain 1, mRNA″ |
| GREB1 | 134 | Homo sapiens growth regulating estrogen receptor |
| | | binding 1, transcript variant a, mRNA″ |
| HDDC2 | 135 | Homo sapiens HD domain containing 2, mRNA″ |
| PSD3 | 136 | Homo sapiens pleckstrin and Sec7 domain containing |
| | | 3, transcript variant 1, mRNA″ |
| KRT6B | 137 | Homo sapiens keratin 6B, mRNA″ |
| KRT6A | 138 | Homo sapiens keratin 6A, mRNA″ |
| FUT9 | 139 | Homo sapiens fucosyltransferase 9, mRNA″ |
| CEP68 | 140 | Homo sapiens centrosomal protein 68, transcript |
| | | variant 1, mRNA″ |
| PNMA2 | 141 | Homo sapiens PNMA family member 2, mRNA″ |
| POU2AF1 | 142 | Homo sapiens POU class 2 associating factor 1, |
| | | mRNA″ |
| FUT7) | 143 | Homo sapiens fucosyltransferase 7, mRNA″ |
| REG1B | 144 | Homo sapiens regenerating family member 1 beta, |
| | | mRNA″ |
| ASCL1 | 145 | Homo sapiens achaete-scute family bHLH |
| | | transcription factor 1, mRNA″ |
| COL6A3 | 146 | Homo sapiens collagen type VI alpha 3 chain, |
| | | transcript variant 1, mRNA″ |
| SERPINB3 | 147 | Homo sapiens serpin family B member 3, mRNA″ |
| GJB2 | 148 | Homo sapiens gap junction protein beta 2, mRNA″ |
| CYTIP | 149 | Homo sapiens cytohesin 1 interacting protein, mRNA″ |
| ST18 | 150 | Homo sapiens ST18, C2H2C-type zinc finger, |
| | | transcript variant 1, mRNA″ |
| CADPS | 151 | Homo sapiens calcium dependent secretion activator, |
| | | transcript variant 1, mRNA″ |
| AKAP12 | 152 | Homo sapiens A-kinase anchoring protein 12, |
| | | transcript variant 1, mRNA″ |
| CA3 | 153 | Homo sapiens carbonic anhydrase 3, mRNA″ |
| LACTB2 | 154 | Homo sapiens lactamase beta 2, mRNA″ |
| AGR2 | 155 | Homo sapiens anterior gradient 2, protein disulphide |
| | | isomerase family member, mRNA″ |
| PAX9 | 156 | Homo sapiens paired box 9, mRNA″ |
| GABBR2 | 157 | Homo sapiens gamma-aminobutyric acid type B |
| | | receptor subunit 2, mRNA″ |
| MPZL2 | 158 | Homo sapiens myelin protein zero like 2, transcript |
| | | variant 1, mRNA″ |
| AVIL | 159 | Homo sapiens advillin, mRNA″ |
| PCOLCE2 | 160 | Homo sapiens procollagen C-endopeptidase enhancer |
| | | 2, mRNA″ |
| WIF1 | 161 | Homo sapiens WNT inhibitory factor 1, mRNA″ |
| VAMP8 | 162 | Homo sapiens vesicle associated membrane protein 8, |
| | | mRNA″ |
| (ZNF770 | 163 | Homo sapiens zinc finger protein 770, mRNA″ |
| COMMD2 | 164 | Homo sapiens COMM domain containing 2, transcript |
| | | variant 1, mRNA″ |
| SCG2 | 165 | Homo sapiens secretogranin II, mRNA″ |
| FEZ1 | 166 | Homo sapiens fasciculation and elongation protein |
| | | zeta 1, transcript variant 1, mRNA″ |
| SYNGR3 | 167 | Homo sapiens synaptogyrin 3, mRNA″ |
| NAP1L3 | 168 | Homo sapiens nucleosome assembly protein 1 like 3, |
| | | mRNA″ |
| OLFM4 | 169 | Homo sapiens olfactomedin 4, mRNA″ |
| AQP3 | 170 | Homo sapiens aquaporin 3 (Gill blood group), |
| | | transcript variant 1, mRNA″ |
| KIF5C | 171 | Homo sapiens kinesin family member 5C, transcript |
| | | variant 1, mRNA″ |
| MYL9 | 172 | Homo sapiens myosin light chain 9, transcript variant |
| | | 1, mRNA″ |
| FOXG1 | 173 | Homo sapiens forkhead box G1, mRNA″ |
| CSRP3 | 174 | Homo sapiens cysteine and glycine rich protein 3, |
| | | mRNA″ |
| NEFL | 175 | Homo sapiens neurofilament light, mRNA″ |
| ZFYVE9 | 176 | Homo sapiens zinc finger FYVE-type containing 9, |
| | | transcript variant 3, mRNA″ |
| SHANK2 | 177 | Homo sapiens SH3 and multiple ankyrin repeat |
| | | domains 2, transcript variant 1, mRNA″ |
| GATA6 | 178 | Homo sapiens GATA binding protein 6, mRNA″ |
| HS3ST3B1 | 179 | Homo sapiens heparan sulfate-glucosamine 3- |
| | | sulfotransferase 3B1, transcript variant 1, mRNA″ |
| CALB1 | 180 | Homo sapiens calbindin 1, mRNA″ |
| POU3F3 | 181 | Homo sapiens POU class 3 homeobox 3, mRNA″ |
| CDH1 | 182 | Homo sapiens cadherin 1, transcript variant 1, |
| | | mRNA″ |
| OGN | 183 | Homo sapiens osteoglycin, transcript variant 3, |
| | | mRNA″ |
| HDAC6 | 184 | Homo sapiens histone deacetylase 6, transcript variant |
| | | 5, mRNA″ |
| DHRS7 | 185 | Homo sapiens dehydrogenase/reductase 7, transcript |
| | | variant 1, mRNA″ |
| PIAS2 | 186 | Homo sapiens protein inhibitor of activated STAT 2, |
| | | transcript variant beta, mRNA″ |
| FRRS1L | 187 | Homo sapiens ferric chelate reductase 1 like, mRNA″ |
| SCRG1 | 188 | Homo sapiens stimulator of chondrogenesis 1, |
| | | transcript variant 2, mRNA″ |
| GDF15 | 189 | Homo sapiens growth differentiation factor 15, |
| | | mRNA″ |
| GZMB | 190 | Homo sapiens granzyme B, transcript variant 1, |
| | | mRNA″ |
| CNTN2 | 191 | Homo sapiens contactin 2, transcript variant 1, |
| | | mRNA″ |
| CLCA2 | 192 | Homo sapiens chloride channel accessory 2, mRNA″ |
| LCP2 | 193 | Homo sapiens lymphocyte cytosolic protein 2, |
| | | mRNA″ |
| WSB1 | 194 | Homo sapiens WD repeat and SOCS box containing 1, |
| | | transcript variant 1, mRNA″ |
| ZIC2 | 195 | Homo sapiens Zic family member 2, mRNA″ |
| TNRC6A | 196 | Homo sapiens trinucleotide repeat containing 6A, |
| | | transcript variant 1, mRNA″ |
| ATP8B1 | 197 | Homo sapiens ATPase phospholipid transporting 8B1, |
| | | mRNA″ |
| GPR37 | 198 | Homo sapiens G protein-coupled receptor 37, mRNA″ |
| COQ2 | 199 | Homo sapiens coenzyme Q2, polyprenyltransferase, |
| | | transcript variant 1, mRNA″ |
| APOA2 | 200 | Homo sapiens apolipoprotein A2, mRNA″ |
| ENO2 | 201 | Homo sapiens enolase 2, mRNA″ |
| CST1 | 202 | Homo sapiens cystatin SN, mRNA″ |
| TNNC2 | 203 | Homo sapiens troponin C2, fast skeletal type, mRNA″ |
| ELAVL3 | 204 | Homo sapiens ELAV like RNA binding protein 3, |
| | | transcript variant 1, mRNA″ |
| HLA-DQA1 | 205 | Homo sapiens major histocompatibility complex, class |
| | | II, DQ alpha 1, mRNA″ |
| ITGA9 | 206 | Homo sapiens integrin subunit alpha 9, mRNA″ |
| DES | 207 | Homo sapiens desmin, mRNA″ |
| RGS1 | 208 | Homo sapiens regulator of G protein signaling 1, |
| | | mRNA″ |
| FLG | 209 | Homo sapiens filaggrin, mRNA″ |
| LUM | 210 | Homo sapiens lumican, mRNA″ |
| VSNL1 | 211 | Homo sapiens visinin like 1, mRNA″ |
| CD52 | 212 | Homo sapiens CD52 molecule, mRNA″ |
| ZIC1 | 213 | Homo sapiens Zic family member 1, mRNA″ |
| SPRR1B | 214 | Homo sapiens small proline rich protein 1B, mRNA″ |
| S100A9 | 215 | Homo sapiens S100 calcium binding protein A9, |
| | | mRNA″ |
| S100A7 | 216 | Homo sapiens S100 calcium binding protein A7, |
| | | mRNA″ |
| NID1 | 217 | Homo sapiens nidogen 1, mRNA″ |
| COL6A2 | 218 | Homo sapiens collagen type VI alpha 2 chain, |
| | | transcript variant 2C2, mRNA″ |
| EREG | 219 | Homo sapiens epiregulin, mRNA″ |
| DSG3 | 220 | Homo sapiens desmoglein 3, mRNA″ |
| PRM1 | 221 | Homo sapiens protamine 1, mRNA″ |
| KRT13 | 222 | Homo sapiens keratin 13, transcript variant 2, mRNA″ |
| KRT19 | 223 | Homo sapiens keratin 19, mRNA″ |
| TNP1 | 224 | Homo sapiens transition protein 1, mRNA″ |
| TEAD3 | 225 | Homo sapiens TEA domain transcription factor 3, |
| | | mRNA″ |
| CXCL2 | 226 | Homo sapiens C-X-C motif chemokine ligand 2, |
| | | mRNA″ |
| PITX1 | 227 | Homo sapiens paired like homeodomain 1, mRNA″ |
| ADGRB3 | 228 | Homo sapiens adhesion G protein-coupled receptor |
| | | B3, mRNA″ |
| TAC1 | 229 | Homo sapiens tachykinin precursor 1, transcript |
| | | variant beta, mRNA″ |
| TACSTD2 | 230 | Homo sapiens tumor associated calcium signal |
| | | transducer 2, mRNA″ |
| PPP1R3A | 231 | Homo sapiens protein phosphatase 1 regulatory |
| | | subunit 3A, mRNA″ |
| PTX3 | 232 | Homo sapiens pentraxin 3, mRNA″ |
| FABP4 | 233 | Homo sapiens fatty acid binding protein 4, mRNA″ |
| SFRP4 | 234 | Homo sapiens secreted frizzled related protein 4, |
| | | mRNA″ |
| PCK1 | 235 | Homo sapiens phosphoenolpyruvate carboxykinase 1, |
| | | mRNA″ |
| AMBP | 236 | Homo sapiens alpha-1-microglobulin/bikunin |
| | | precursor, mRNA″ |
| SLC6A1 | 237 | Homo sapiens solute carrier family 6 member 1, |
| | | transcript variant 1, mRNA″ |
| SCGB2A1 | 238 | Homo sapiens secretoglobin family 2A member 1, |
| | | mRNA″ |
| PRKCB | 239 | Homo sapiens protein kinase C beta, transcript variant |
| | | 2, mRNA″ |
| EMP1 | 240 | Homo sapiens epithelial membrane protein 1, mRNA″ |
| TNNC1 | 241 | Homo sapiens troponin C1, slow skeletal and cardiac |
| | | type, mRNA″ |
| BTG1 | 242 | Homo sapiens BTG anti-proliferation factor 1, |
| | | mRNA″ |
| KRT15 | 243 | Homo sapiens keratin 15, mRNA″ |
| EPCAM | 244 | Homo sapiens epithelial cell adhesion molecule, |
| | | mRNA″ |
| CHGB | 245 | Homo sapiens chromogranin B, mRNA″ |
| CD69 | 246 | Homo sapiens CD69 molecule, mRNA″ |
| PIGR | 247 | Homo sapiens polymeric immunoglobulin receptor, |
| | | mRNA″ |
| PPBP | 248 | Homo sapiens pro-platelet basic protein, mRNA″ |
| DPT | 249 | Homo sapiens dermatopontin, mRNA″ |
| REG3A | 250 | Homo sapiens regenerating family member 3 alpha, |
| | | transcript variant 1, mRNA″ |
| S100A8 | 251 | Homo sapiens S100 calcium binding protein A8, |
| | | transcript variant 4, mRNA″ |
| NKX2-2 | 252 | Homo sapiens NK2 homeobox 2, mRNA″ |
| THRSP | 253 | Homo sapiens thyroid hormone responsive, mRNA″ |
| H3F3A | 254 | Homo sapiens H3 histone family member 3A, mRNA″ |
| PCDH8 | 255 | Homo sapiens protocadherin 8, transcript variant 1, |
| | | mRNA″ |
| FABP1 | 256 | Homo sapiens fatty acid binding protein 1, mRNA″ |
| SOX2 | 257 | Homo sapiens SRY-box 2, mRNA″ |
| MSMB | 258 | Homo sapiens microseminoprotein beta, transcript |
| | | variant PSP94, mRNA″ |
| CSH1 | 259 | Homo sapiens chorionic somatomammotropin |
| | | hormone 1, mRNA″ |
| STRN | 260 | Homo sapiens striatin, mRNA″ |
| EEF1A2 | 261 | Homo sapiens eukaryotic translation elongation factor |
| | | 1 alpha 2, mRNA″ |
| CKM | 262 | Homo sapiens creatine kinase, M-type, mRNA″ |
| GCG | 263 | Homo sapiens glucagon, mRNA″ |
| CEL | 264 | Homo sapiens carboxyl ester lipase, mRNA″ |
| CXCL5 | 265 | Homo sapiens C-X-C motif chemokine ligand 5, |
| | | mRNA″ |
| COL15A1 | 266 | Homo sapiens collagen type XV alpha 1 chain, |
| | | mRNA″ |
| YWHAB | 267 | Homo sapiens tyrosine 3-monooxygenase/tryptophan |
| | | 5-monooxygenase activation protein beta, transcript |
| | | variant 1, mRNA″ |
| SCGB2A2 | 268 | Homo sapiens secretoglobin family 2A member 2, |
| | | mRNA″ |
| SH3GL2 | 269 | Homo sapiens SH3 domain containing GRB2 like 2, |
| | | endophilin A1, mRNA″ |
| SPINK1 | 270 | Homo sapiens serine peptidase inhibitor, Kazal type 1, |
| | | transcript variant 2, mRNA″ |
| SERPINB4 | 271 | Homo sapiens serpin family B member 4, transcript |
| | | variant 1, mRNA″ |
| HTN1 | 272 | Homo sapiens histatin 1, mRNA″ |
| CPA1 | 273 | Homo sapiens carboxypeptidase A1, mRNA″ |
| FCAR | 274 | Homo sapiens Fc fragment of IgA receptor, transcript |
| | | variant 1, mRNA″ |
| CFAP47 | 275 | Homo sapiens cilia and flagella associated protein 47, |
| | | transcript variant 1, mRNA″ |
| APOBEC1 | 276 | Homo sapiens apolipoprotein B mRNA editing |
| | | enzyme catalytic subunit 1, transcript variant 2, |
| | | mRNA″ |
| CRTAM | 277 | Homo sapiens cytotoxic and regulatory T cell |
| | | molecule, transcript variant 2, mRNA″ |
| CKS2 | 278 | Homo sapiens CDC28 protein kinase regulatory |
| | | subunit 2, mRNA″ |
| DSG1 | 279 | Homo sapiens desmoglein 1, mRNA″ |
| TMEFF2 | 280 | Homo sapiens transmembrane protein with EGF like |
| | | and two follistatin like domains 2, transcript variant 2, |
| | | mRNA″ |
| THBS1 | 281 | Homo sapiens thrombospondin 1, mRNA″ |
| SEPT11 | 282 | Homo sapiens septin 11, transcript variant 1, mRNA″ |
| SERPINB13 | 283 | Homo sapiens serpin family B member 13, transcript |
| | | variant 1, mRNA″ |
| EED | 284 | Homo sapiens embryonic ectoderm development, |
| | | transcript variant 3, mRNA″ |
| LGI1 | 285 | Homo sapiens leucine rich glioma inactivated 1, |
| | | transcript variant 2, mRNA″ |
| ADAM32 | 286 | Homo sapiens ADAM metallopeptidase domain 32, |
| | | transcript variant 2, mRNA″ |
| DCN | 287 | Homo sapiens decorin, transcript variant A1, mRNA″ |
| CPE | 288 | Homo sapiens carboxypeptidase E, mRNA″ |
| LSAMP | 289 | Homo sapiens limbic system associated membrane |
| | | protein, transcript variant 1, mRNA″ |
| FABP7 | 290 | Homo sapiens fatty acid binding protein 7, transcript |
| | | variant 1, mRNA″ |
| CSHL1 | 291 | Homo sapiens chorionic somatomammotropin |
| | | hormone like 1, transcript variant 3, mRNA″ |
| SNAP25 | 292 | Homo sapiens synaptosome associated protein 25, |
| | | transcript variant 1, mRNA″ |
| PLN | 293 | Homo sapiens phospholamban, mRNA″ |
| INHBA | 294 | Homo sapiens inhibin beta A subunit, mRNA″ |
| PTN | 295 | Homo sapiens pleiotrophin, transcript variant 1, |
| | | mRNA″ |
| MNDA | 296 | Homo sapiens myeloid cell nuclear differentiation |
| | | antigen, mRNA″ |
| PMP2 | 297 | Homo sapiens peripheral myelin protein 2, transcript |
| | | variant 1, mRNA″ |
| AHSG | 298 | Homo sapiens alpha 2-HS glycoprotein, transcript |
| | | variant 2, mRNA″ |
| AQP4 | 299 | Homo sapiens aquaporin 4, transcript variant 1, |
| | | mRNA″ |
| CAMK2B | 300 | Homo sapiens calcium/calmodulin dependent protein |
| | | kinase II beta, transcript variant 1, mRNA″ |
| AZGP1 | 301 | Homo sapiens alpha-2-glycoprotein 1, zinc-binding, |
| | | mRNA″ |
| ADIPOQ | 302 | Homo sapiens adiponectin, C1Q and collagen domain |
| | | containing, transcript variant 1, mRNA″ |
| IGLL5 | 303 | Homo sapiens immunoglobulin lambda like |
| | | polypeptide 5, transcript variant 1, mRNA″ |
| BCAT1 | 304 | Homo sapiens branched chain amino acid |
| | | transaminase 1, transcript variant 2, mRNA″ |
| SUFU | 305 | Homo sapiens SUFU negative regulator of hedgehog |
| | | signaling, transcript variant 2, mRNA″ |
| CPEB3 | 306 | Homo sapiens cytoplasmic polyadenylation element |
| | | binding protein 3, transcript variant 2, mRNA″ |
| FGB | 307 | Homo sapiens fibrinogen beta chain, transcript variant |
| | | 2, mRNA″ |
| TUT7 | 308 | Homo sapiens terminal uridylyl transferase 7, |
| | | transcript variant 2, mRNA″ |
| RPH3AL | 309 | Homo sapiens rabphilin 3A like (without C2 |
| | | domains), transcript variant 2, mRNA″ |
| NCOR1 | 310 | Homo sapiens nuclear receptor corepressor 1, |
| | | transcript variant 2, mRNA″ |
| GREM1 | 311 | Homo sapiens gremlin 1, DAN family BMP |
| | | antagonist, transcript variant 3, mRNA″ |
| ENO3 | 312 | Homo sapiens enolase 3 (ENO3), transcript variant 3, |
| | | mRNA″ |
| MATR3 | 313 | Homo sapiens matrin 3, transcript variant 3, mRNA″ |
| DCLK1 | 314 | Homo sapiens doublecortin like kinase 1, transcript |
| | | variant 2, mRNA″ |
| LOC100505841 | 315 | Homo sapiens zinc finger protein 474-like, mRNA″ |
| CAMTA1 | 316 | Homo sapiens calmodulin binding transcription |
| | | activator 1, transcript variant 2, mRNA″ |
| RUNX1T1 | 317 | Homo sapiens RUNX1 translocation partner 1, |
| | | transcript variant 5, mRNA″ |
| SEPT4 | 318 | Homo sapiens septin 4, transcript variant 4, mRNA″ |
| LIPF | 319 | Homo sapiens lipase F, gastric type, transcript variant |
| | | 3, mRNA″ |
| MSANTD3- | 320 | Homo sapiens MSANTD3-TMEFF1 readthrough, |
| TMEFF1 | | mRNA″ |
| DCTN5 | 321 | Homo sapiens dynactin subunit 5, transcript variant 2, |
| | | mRNA″ |
| LTF | 322 | Homo sapiens lactotransferrin, transcript variant 2, |
| | | mRNA″ |
| STMN2 | 323 | Homo sapiens stathmin 2, transcript variant 1, |
| | | mRNA″ |
| PHACTR3 | 324 | Homo sapiens phosphatase and actin regulator 3, |
| | | transcript variant 4, mRNA″ |
| CTSS | 325 | Homo sapiens cathepsin S, transcript variant 2, |
| | | mRNA″ |
| INTS7 | 326 | Homo sapiens integrator complex subunit 7, transcript |
| | | variant 4, mRNA″ |
| SPRR1A | 327 | Homo sapiens small proline rich protein 1A, transcript |
| | | variant 1, mRNA″ |
| WDR27 | 328 | Homo sapiens WD repeat domain 27, transcript |
| | | variant 2, mRNA″ |
| ANKS1B | 329 | Homo sapiens ankyrin repeat and sterile alpha motif |
| | | domain containing 1B, transcript variant 4, mRNA″ |
| PRPS1 | 330 | Homo sapiens phosphoribosyl pyrophosphate |
| | | synthetase 1, transcript variant 2, mRNA″ |
| SORT1 | 331 | Homo sapiens sortilin 1, transcript variant 2, mRNA″ |
| EHF | 332 | Homo sapiens ETS homologous factor, transcript |
| | | variant 3, mRNA″ |
| RFX4 | 333 | Homo sapiens regulatory factor X4, transcript variant |
| | | 4, mRNA″ |
| PTPRZ1 | 334 | Homo sapiens protein tyrosine phosphatase, receptor |
| | | type Z1, transcript variant 2, mRNA″ |
| SNAP91 | 335 | Homo sapiens synaptosome associated protein 91, |
| | | transcript variant 3, mRNA″ |
| RTN1 | 336 | Homo sapiens reticulon 1, transcript variant 4, |
| | | mRNA″ |
| SLC24A2 | 337 | Homo sapiens solute carrier family 24 member 2, |
| | | transcript variant 2, mRNA″ |
| GNG2 | 338 | Homo sapiens G protein subunit gamma 2, transcript |
| | | variant 2, mRNA″ |
| GFPT1 | 339 | Homo sapiens glutamine--fructose-6-phosphate |
| | | transaminase 1, transcript variant 1, mRNA″ |
| KRTDAP | 340 | Homo sapiens keratinocyte differentiation associated |
| | | protein, transcript variant 2, mRNA″ |
| TRDN | 341 | Homo sapiens triadin, transcript variant 2, mRNA″ |
| CLPS | 342 | Homo sapiens colipase, transcript variant 2, mRNA″ |
| SLC1A2 | 343 | Homo sapiens solute carrier family 1 member 2, |
| | | transcript variant 2, mRNA″ |
| CHL1 | 344 | Homo sapiens cell adhesion molecule L1 like, |
| | | transcript variant 2, mRNA″ |
| AKR1C3 | 345 | Homo sapiens aldo-keto reductase family 1 member |
| | | C3, transcript variant 2, mRNA″ |
| CYB5D2 | 346 | Homo sapiens cytochrome b5 domain containing 2, |
| | | transcript variant 2, mRNA″ |
| CNTN1 | 347 | Homo sapiens contactin 1, transcript variant 3, |
| | | mRNA″ |
| TDRP | 348 | Homo sapiens testis development related protein, |
| | | transcript variant 2, mRNA″ |
| SAMSN1 | 349 | Homo sapiens SAM domain, SH3 domain and nuclear |
| | | localization signals 1, transcript variant 2, mRNA″ |
| CACNA1G | 350 | Homo sapiens calcium voltage-gated channel subunit |
| | | alpha1 G, transcript variant 16, mRNA″ |
| MEGF10 | 351 | Homo sapiens multiple EGF like domains 10, |
| | | transcript variant 2, mRNA″ |
| ENC1 | 352 | Homo sapiens ectodermal-neural cortex 1, transcript |
| | | variant 2, mRNA″ |
| CCT4 | 353 | Homo sapiens chaperonin containing TCP1 subunit 4, |
| | | transcript variant 2, mRNA″ |
| PEX5L | 354 | Homo sapiens peroxisomal biogenesis factor 5 like, |
| | | transcript variant 2, mRNA″ |
| TTN | 355 | Homo sapiens titin, transcript variant N2BA, mRNA″ |
| DNAJC6 | 356 | Homo sapiens DnaJ heat shock protein family (Hsp40) |
| | | member C6, transcript variant 1, mRNA″ |
| CLCN4 | 357 | Homo sapiens chloride voltage-gated channel 4, |
| | | transcript variant 2, mRNA″ |
| DDX11 | 358 | Homo sapiens DEAD/H-box helicase 11, transcript |
| | | variant 4, mRNA″ |
| GPM6A | 359 | Homo sapiens glycoprotein M6A, transcript variant 4, |
| | | mRNA″ |
| INSL3 | 360 | Homo sapiens insulin like 3, transcript variant 1, |
| | | mRNA″ |
| PTPRC | 361 | Homo sapiens protein tyrosine phosphatase, receptor |
| | | type C, transcript variant 5, mRNA″ |
| PKIB | 362 | Homo sapiens cAMP-dependent protein kinase |
| | | inhibitor beta, transcript variant 4, mRNA″ |
| KCNJ16 | 363 | Homo sapiens potassium voltage-gated channel |
| | | subfamily J member 16, transcript variant 4, mRNA″ |
| NRM | 364 | Homo sapiens nurim, transcript variant 2, mRNA″ |
| TFPI2 | 365 | Homo sapiens tissue factor pathway inhibitor 2, |
| | | transcript variant 2, mRNA″ |
| JPH3 | 366 | Homo sapiens junctophilin 3, transcript variant 2, |
| | | mRNA″ |
| PNLDC1 | 367 | Homo sapiens PARN like, ribonuclease domain |
| | | containing 1, transcript variant 1, mRNA″ |
| GANAB | 368 | Homo sapiens glucosidase II alpha subunit, transcript |
| | | variant 4, mRNA″ |
| MOBP | 369 | Homo sapiens myelin-associated oligodendrocyte |
| | | basic protein, transcript variant 1, mRNA″ |
| TAGAP | 370 | Homo sapiens T cell activation RhoGTPase activating |
| | | protein, transcript variant 4, mRNA″ |
| CSMD2 | 371 | Homo sapiens CUB and Sushi multiple domains 2, |
| | | transcript variant 1, mRNA″ |
| PPFIA2 | 372 | Homo sapiens PTPRF interacting protein alpha 2, |
| | | transcript variant 2, mRNA″ |
| OLFM1 | 373 | Homo sapiens olfactomedin 1, transcript variant 4, |
| | | mRNA″ |
| STMN4 | 374 | Homo sapiens stathmin 4, transcript variant 2, |
| | | mRNA″ |
| PRM2 | 375 | Homo sapiens protamine 2, transcript variant 2, |
| | | mRNA″ |
| KLF5 | 376 | Homo sapiens Kruppel like factor 5, transcript variant |
| | | 2, mRNA″ |
| CTNND2 | 377 | Homo sapiens catenin delta 2, transcript variant 2, |
| | | mRNA″ |
| GMIP | 378 | Homo sapiens GEM interacting protein, transcript |
| | | variant 2, mRNA″ |
| SMARCA2 | 379 | Homo sapiens SWI/SNF related, matrix associated, |
| | | actin dependent regulator of chromatin, subfamily a, |
| | | member 2, transcript variant 3, mRNA″ |
| CRYAB | 380 | Homo sapiens crystallin alpha B, transcript variant 2, |
| | | mRNA″ |
| TPTE | 381 | Homo sapiens transmembrane phosphatase with tensin |
| | | homology, transcript variant 4, mRNA″ |
| CD24 | 382 | Homo sapiens CD24 molecule, transcript variant 2, |
| | | mRNA″ |
| UGT2B4 | 383 | Homo sapiens UDP glucuronosyltransferase family 2 |
| | | member B4, transcript variant 2, mRNA″ |
| MFAP5 | 384 | Homo sapiens microfibril associated protein 5, |
| | | transcript variant 2, mRNA″ |
| SYDE1 | 385 | Homo sapiens synapse defective Rho GTPase |
| | | homolog 1, transcript variant 2, mRNA″ |
| QKI | 386 | Homo sapiens QKI, KH domain containing RNA |
| | | binding, transcript variant 5, mRNA″ |
| CCR7 | 387 | Homo sapiens C-C motif chemokine receptor 7, |
| | | transcript variant 2, mRNA″ |
| ANLN | 388 | Homo sapiens anillin actin binding protein, transcript |
| | | variant 2, mRNA″ |
| MYT1L | 389 | Homo sapiens myelin transcription factor 1 like, |
| | | transcript variant 1, mRNA″ |
| PRUNE1 | 390 | Homo sapiens prune exopolyphosphatase 1, transcript |
| | | variant 2, mRNA″ |
| PRSS2 | 391 | Homo sapiens serine protease 2, transcript variant 1, |
| | | mRNA″ |
| ARMC7 | 392 | Homo sapiens armadillo repeat containing 7, transcript |
| | | variant 2, mRNA″ |
| LMOD3 | 393 | Homo sapiens leiomodin 3, transcript variant 2, |
| | | mRNA″ |
| STXBP6 | 394 | Homo sapiens syntaxin binding protein 6, transcript |
| | | variant 2, mRNA″ |
| HNRNPUL1 | 395 | Homo sapiens heterogeneous nuclear |
| | | ribonucleoprotein U like 1, transcript variant 5, |
| | | mRNA″ |
| RNF217 | 396 | Homo sapiens ring finger protein 217, transcript |
| | | variant 1, mRNA″ |
| FILIP1 | 397 | Homo sapiens filamin A interacting protein 1, |
| | | transcript variant 1, mRNA″ |
| CRISP3 | 398 | Homo sapiens cysteine rich secretory protein 3, |
| | | transcript variant 2, mRNA″ |
| RGS7 | 399 | Homo sapiens regulator of G protein signaling 7, |
| | | transcript variant 2, mRNA″ |
| ACTA1 | 400 | Homo sapiens actin, alpha 1, skeletal muscle, mRNA″ |
| SST | 401 | Homo sapiens somatostatin, mRNA″ |
| SPOCK3 | 402 | Homo sapiens SPARC (osteonectin), cwcv and kazal |
| | | like domains proteoglycan 3, transcript variant 1, |
| | | mRNA″ |
| SCN2A | 403 | Homo sapiens sodium voltage-gated channel alpha |
| | | subunit 2, transcript variant 2, mRNA″ |
| ZNF557 | 404 | Homo sapiens zinc finger protein 557, transcript |
| | | variant 2, mRNA″ |
| ANKRD7 | 405 | Homo sapiens ankyrin repeat domain 7, transcript |
| | | variant 1, mRNA″ |
| ONECUT3 | 406 | Homo sapiens one cut homeobox 3, mRNA″ |
| SNTN | 407 | Homo sapiens sentan, cilia apical structure protein, |
| | | transcript variant 2, mRNA″ |
| DEFA1B | 408 | Homo sapiens defensin alpha 1B, transcript variant 2, |
| | | mRNA″ |
| SPRR3 | 409 | Homo sapiens small proline rich protein 3, transcript |
| | | variant 2, mRNA″ |
| MYH2 | 410 | Homo sapiens myosin heavy chain 2, transcript |
| | | variant 2, mRNA″ |
| RAPGEF4 | 411 | Homo sapiens Rap guanine nucleotide exchange |
| | | factor 4, transcript variant 2, mRNA″ |
| PNMA8A | 412 | Homo sapiens PNMA family member 8A, transcript |
| | | variant 2, mRNA″ |
| NEFM | 413 | Homo sapiens neurofilament medium, transcript |
| | | variant 2, mRNA″ |
| PRH2 | 414 | Homo sapiens proline rich protein HaeIII subfamily 2, |
| | | mRNA″ |
| NAA16 | 415 | Homo sapiens N(alpha)-acetyltransferase 16, NatA |
| | | auxiliary subunit, transcript variant 3, mRNA″ |
| SLC8A1 | 416 | Homo sapiens solute carrier family 8 member A1, |
| | | transcript variant B, mRNA″ |
| CLIC5 | 417 | Homo sapiens chloride intracellular channel 5, |
| | | transcript variant 1, mRNA″ |
| BCL2A1 | 418 | Homo sapiens BCL2 related protein A1, transcript |
| | | variant 2, mRNA″ |
| SERPINI1 | 419 | Homo sapiens serpin family I member 1, transcript |
| | | variant 2, mRNA″ |
| NRGN | 420 | Homo sapiens neurogranin, transcript variant 2, |
| | | mRNA″ |
| DIAPH1 | 421 | Homo sapiens diaphanous related formin 1, transcript |
| | | variant 2, mRNA″ |
| SALL1 | 422 | Homo sapiens spalt like transcription factor 1, |
| | | transcript variant 2, mRNA″ |
| SYNPR | 423 | Homo sapiens synaptoporin, transcript variant 1, |
| | | mRNA″ |
| PLEKHB1 | 424 | Homo sapiens pleckstrin homology domain containing |
| | | B1, transcript variant 3, mRNA″ |
| GAP43 | 425 | Homo sapiens growth associated protein 43, transcript |
| | | variant 1, mRNA″ |
| TRIM2 | 426 | Homo sapiens tripartite motif containing 2, transcript |
| | | variant 2, mRNA″ |
| KLC1 | 427 | Homo sapiens kinesin light chain 1, transcript variant |
| | | 3, mRNA″ |
| GJB6 | 428 | Homo sapiens gap junction protein beta 6, transcript |
| | | variant 1, mRNA″ |
| NDRG4 | 429 | Homo sapiens NDRG family member 4, transcript |
| | | variant 2, mRNA″ |
| HMGB2 | 430 | Homo sapiens high mobility group box 2, transcript |
| | | variant 2, mRNA″ |
| PLAC8 | 431 | Homo sapiens placenta specific 8, transcript variant 3, |
| | | mRNA″ |
| CDC2 | 432 | Homo sapiens cell division cycle 2, G1 to S and G2 to |
| | | M, transcript variant 3, mRNA″ |
| MAP4 | 433 | Homo sapiens microtubule associated protein 4, |
| | | transcript variant 4, mRNA″ |
| SLC12A5 | 434 | Homo sapiens solute carrier family 12 member 5, |
| | | transcript variant 1, mRNA″ |
| ZSCAN31 | 435 | Homo sapiens zinc finger and SCAN domain |
| | | containing 31, transcript variant 3, mRNA″ |
| SYT1 | 436 | Homo sapiens synaptotagmin 1, transcript variant 2, |
| | | mRNA″ |
| MYOT | 437 | Homo sapiens myotilin, transcript variant 2, mRNA″ |
| POSTN | 438 | Homo sapiens periostin, transcript variant 2, mRNA″ |
| LRRFIP1 | 439 | Homo sapiens LRR binding FLII interacting protein 1, |
| | | transcript variant 1, mRNA″ |
| SERPINB2 | 440 | Homo sapiens serpin family B member 2, transcript |
| | | variant 1, mRNA″ |
| MUC7 | 441 | Homo sapiens mucin 7, secreted, transcript variant 1, |
| | | mRNA″ |
| CPT1B | 442 | Homo sapiens carnitine palmitoyltransferase 1B, |
| | | transcript variant 5, mRNA″ |
| C12orf75 | 443 | Homo sapiens chromosome 12 open reading frame 75, |
| | | mRNA″ |
| ADAMDEC1 | 444 | Homo sapiens ADAM like decysin 1, transcript |
| | | variant 2, mRNA″ |
| TPM2 | 445 | Homo sapiens tropomyosin 2 (beta), transcript variant |
| | | 3, mRNA″ |
| MMP1 | 446 | Homo sapiens matrix metallopeptidase 1, transcript |
| | | variant 2, mRNA″ |
| PEG3 | 447 | Homo sapiens paternally expressed 3, transcript |
| | | variant 2, mRNA″ |
| MPZL1 | 448 | Homo sapiens myelin protein zero like 1, transcript |
| | | variant 3, mRNA″ |
| ETNPPL | 449 | Homo sapiens ethanolamine-phosphate phospholyase, |
| | | transcript variant 2, mRNA″ |
| SLC39A11 | 450 | Homo sapiens solute carrier family 39 member 11, |
| | | transcript variant 1, mRNA″ |
| SCEL | 451 | Homo sapiens sciellin, transcript variant 3, mRNA″ |
| MAFF | 452 | Homo sapiens MAF bZIP transcription factor F, |
| | | transcript variant 3, mRNA″ |
| WWC1 | 453 | Homo sapiens WW and C2 domain containing 1, |
| | | transcript variant 1, mRNA″ |
| TF | 454 | Homo sapiens transferrin, transcript variant 1, mRNA″ |
| NEB | 455 | Homo sapiens nebulin, transcript variant 1, mRNA″ |
| SCG3 | 456 | Homo sapiens secretogranin III, transcript variant 2, |
| | | mRNA″ |
| CALM1 | 457 | Homo sapiens calmodulin 1 (phosphorylase kinase, |
| | | delta), transcript variant 2, mRNA″ |
| CADM2 | 458 | Homo sapiens cell adhesion molecule 2, transcript |
| | | variant 1, mRNA″ |
| ATRAID | 459 | Homo sapiens all-trans retinoic acid induced |
| | | differentiation factor, transcript variant 3, mRNA″ |
| FAM122C | 460 | Homo sapiens family with sequence similarity 122C, |
| | | transcript variant 1, mRNA″ |
| SIGLEC10 | 461 | Homo sapiens sialic acid binding Ig like lectin 10, |
| | | transcript variant 2, mRNA″ |
| ELAVL2 | 462 | Homo sapiens ELAV like RNA binding protein 2, |
| | | transcript variant 2, mRNA″ |
| FAAP20 | 463 | Homo sapiens Fanconi anemia core complex |
| | | associated protein 20, transcript variant 1, mRNA″ |
| CSRNP3 | 464 | Homo sapiens cysteine and serine rich nuclear protein |
| | | 3, transcript variant 1, mRNA″ |
| NEXN | 465 | Homo sapiens nexilin F-actin binding protein, |
| | | transcript variant 2, mRNA″ |
| MYD88 | 466 | Homo sapiens myeloid differentiation primary |
| | | response 88, transcript variant 5, mRNA″ |
| BANP | 467 | Homo sapiens BTG3 associated nuclear protein, |
| | | transcript variant 3, mRNA″ |
| GBP5 | 468 | Homo sapiens guanylate binding protein 5, transcript |
| | | variant 2, mRNA″ |
| XIRP2 | 469 | Homo sapiens xin actin binding repeat containing 2, |
| | | transcript variant 2, mRNA″ |
| PRR4 | 470 | Homo sapiens proline rich 4, transcript variant 1, |
| | | mRNA″ |
| GFAP | 471 | Homo sapiens glial fibrillary acidic protein, transcript |
| | | variant 2, mRNA″ |
| SLAIN1 | 472 | Homo sapiens SLAIN motif family member 1, |
| | | transcript variant 1, mRNA″ |
| PDLIM3 | 473 | Homo sapiens PDZ and LIM domain 3, transcript |
| | | variant 2, mRNA″ |
| HMGCS1 | 474 | Homo sapiens 3-hydroxy-3-methylglutaryl-CoA |
| | | synthase 1, transcript variant 1, mRNA″ |
| CRISP2 | 475 | Homo sapiens cysteine rich secretory protein 2, |
| | | transcript variant 2, mRNA″ |
| SZRD1 | 476 | Homo sapiens SUZ RNA binding domain containing |
| | | 1, transcript variant 1, mRNA″ |
| GBA3 | 477 | Homo sapiens glucosylceramidase beta 3 |
| | | (gene/pseudogene), transcript variant 2, coding, |
| | | mRNA″ |
| DST | 478 | Homo sapiens dystonin, transcript variant 2, mRNA″ |
| DNM3 | 479 | Homo sapiens dynamin 3, transcript variant 2, |
| | | mRNA″ |
| ACTN2 | 480 | Homo sapiens actinin alpha 2, transcript variant 1, |
| | | mRNA″ |
| MAPK3 | 481 | Homo sapiens mitogen-activated protein kinase 3, |
| | | transcript variant 2, mRNA″ |
| TIMM17B | 482 | Homo sapiens translocase of inner mitochondrial |
| | | membrane 17B, transcript variant 1, mRNA″ |
| ACSF3 | 483 | Homo sapiens acyl-CoA synthetase family member 3, |
| | | transcript variant 2, mRNA″ |
| OSR2 | 484 | Homo sapiens odd-skipped related transciption factor |
| | | 2, transcript variant 1, mRNA″ |
| SYNPO2L | 485 | Homo sapiens synaptopodin 2 like, transcript variant |
| | | 1, mRNA″ |
| IFT22 | 486 | Homo sapiens intraflagellar transport 22, transcript |
| | | variant 2, mRNA″ |
| CPN2 | 487 | Homo sapiens carboxypeptidase N subunit 2, |
| | | transcript variant 1, mRNA″ |
| NKAIN2 | 488 | Homo sapiens sodium/potassium transporting ATPase |
| | | interacting 2, transcript variant 1, mRNA″ |
| PRG4 | 489 | Homo sapiens proteoglycan 4, transcript variant B, |
| | | mRNA″ |
| EML4 | 490 | Homo sapiens echinoderm microtubule associated |
| | | protein like 4, transcript variant 2, mRNA″ |
| CLEC12B | 491 | Homo sapiens C-type lectin domain family 12 |
| | | member B, transcript variant 1, mRNA″ |
| UGT8 | 492 | Homo sapiens UDP glycosyltransferase 8, transcript |
| | | variant 1, mRNA″ |
| ZCWPW2 | 493 | Homo sapiens zinc finger CW-type and PWWP |
| | | domain containing 2, transcript variant 1, mRNA″ |
| PAK3 | 494 | Homo sapiens p21 (RAC1) activated kinase 3, |
| | | transcript variant 1, mRNA″ |
| SCG5 | 495 | Homo sapiens secretogranin V, transcript variant 1, |
| | | mRNA″ |
| NRXN1 | 496 | Homo sapiens neurexin 1, transcript variant alpha2, |
| | | mRNA″ |
| SCN1A | 497 | Homo sapiens sodium voltage-gated channel alpha |
| | | subunit 1, transcript variant 1, mRNA″ |
| ANK2 | 498 | Homo sapiens ankyrin 2, transcript variant 3, mRNA″ |
| RC3H2 | 499 | Homo sapiens ring finger and CCCH-type domains 2, |
| | | transcript variant 1, mRNA″ |
| | 500 | Homo sapiens CREB gene, exon Y″ |
| C8orf8 gene | 501 | Homo sapiens partial mRNA for hypothetical protein |
| | 502 | Homo sapiens IGH mRNA for immunoglobulin heavy |
| | | chain VHDJ region, partial cds, clone:H184″ |
| HBG2 | 503 | Homo sapiens hemoglobin subunit gamma 2, mRNA″ |
| PLA2G1B | 504 | Homo sapiens phospholipase A2 group IB, mRNA″ |
| SPP1 | 505 | Homo sapiens secreted phosphoprotein 1, transcript |
| | | variant 2, mRNA″ |
| KRT18 | 506 | Homo sapiens keratin 18, transcript variant 1, mRNA″ |
| COL1A2 | 507 | Homo sapiens collagen type I alpha 2 chain, mRNA″ |
| GATA3 | 508 | Homo sapiens GATA binding protein 3, transcript |
| | | variant 1, mRNA″ |
| HNRNPL | 509 | Homo sapiens heterogeneous nuclear |
| | | ribonucleoprotein L, transcript variant 2, mRNA″ |
| METTL2A | 510 | Homo sapiens methyltransferase like 2A, mRNA″ |
| STAR | 511 | Homo sapiens steroidogenic acute regulatory protein, |
| | | mRNA″ |
| STATH | 512 | Homo sapiens statherin, transcript variant 2, mRNA″ |
| VWA8 | 513 | Homo sapiens von Willebrand factor A domain |
| | | containing 8, transcript variant 2, mRNA″ |
| GAD1 | 514 | Homo sapiens glutamate decarboxylase 1, transcript |
| | | variant GAD67, mRNA″ |
| CLDN18 | 515 | Homo sapiens claudin 18, transcript variant 2, |
| | | mRNA″ |
| AKT1 | 516 | Homo sapiens AKT serine/threonine kinase 1, |
| | | transcript variant 3, mRNA″ |
| TPM1 | 517 | Homo sapiens tropomyosin 1, transcript variant |
| | | Tpm1.5, mRNA″ |
| DKK3 | 518 | Homo sapiens dickkopf WNT signaling pathway |
| | | inhibitor 3, transcript variant 3, mRNA″ |
| BAALC | 519 | Homo sapiens BAALC, MAP3K1 and KLF4 binding, |
| | | transcript variant 2, mRNA″ |
| ARPP21 | 520 | Homo sapiens cAMP regulated phosphoprotein 21, |
| | | transcript variant 3, mRNA″ |
| MBP | 521 | Homo sapiens myelin basic protein, transcript variant |
| | | 1, mRNA″ |
| KIAA0020 | 522 | Homo sapiens KIAA0020, transcript variant 1, |
| | | mRNA″ |
| KYNU | 523 | Homo sapiens kynureninase, transcript variant 2, |
| | | mRNA″ |
| DLK1 | 524 | Homo sapiens delta-like 1 homolog (Drosophila), |
| | | transcript variant 2, mRNA″ |
| C12orf37 | 525 | Homo sapiens chromosome 12 open reading frame 37, |
| | | mRNA″ |
| PART1 | 526 | Homo sapiens prostate androgen-regulated transcript |
| | | 1, mRNA″ |
| MAP2 | 527 | Homo sapiens microtubule associated protein 2, |
| | | transcript variant 5, mRNA″ |
| VTN | 528 | Homo sapiens vitronectin, mRNA″ |
| LOC643923 | 529 | Homo sapiens hypothetical protein LOC643923, |
| | | mRNA″ |
| COL3A1 | 530 | Homo sapiens collagen type III alpha 1 chain, mRNA″ |
| COL1A1 | 531 | Homo sapiens collagen type I alpha 1 chain, mRNA″ |
| ADORA1 | 532 | Homo sapiens adenosine A1 receptor, transcript |
| | | variant 1, mRNA″ |
| CTRB2 | 533 | Homo sapiens chymotrypsinogen B2, mRNA″ |
| KRT5 | 534 | Homo sapiens keratin 5, mRNA″ |
| GABRB2 | 535 | Homo sapiens gamma-aminobutyric acid type A |
| | | receptor beta2 subunit, transcript variant 2, mRNA″ |
| IL2 | 536 | Homo sapiens interleukin 2, mRNA″ |
| SLC12A1 | 537 | Homo sapiens solute carrier family 12 member 1, |
| | | transcript variant 1, mRNA″ |
| GRIA2 | 538 | Homo sapiens glutamate ionotropic receptor AMPA |
| | | type subunit 2, transcript variant 1, mRNA″ |
| FLG2 | 539 | Homo sapiens filaggrin family member 2, mRNA″ |
| TNNI3 | 540 | Homo sapiens troponin I3, cardiac type, mRNA″ |
| PITX2 | 541 | Homo sapiens paired like homeodomain 2, transcript |
| | | variant 3, mRNA″ |
| CYP11A1 | 542 | Homo sapiens cytochrome P450 family 11 subfamily |
| | | A member 1, transcript variant 1, mRNA″ |
| ECE2 | 543 | Homo sapiens endothelin converting enzyme 2, |
| | | transcript variant 2, mRNA″ |
| ACSM2A | 544 | Homo sapiens acyl-CoA synthetase medium-chain |
| | | family member 2A, transcript variant 3, mRNA″ |
| RHAG | 545 | Homo sapiens Rh associated glycoprotein, mRNA″ |
| CALN1 | 546 | Homo sapiens calneuron 1, transcript variant 2, |
| | | mRNA″ |
| CA2 | 547 | Homo sapiens carbonic anhydrase 2, transcript variant |
| | | 1, mRNA″ |
| GRIA3 | 548 | Homo sapiens glutamate ionotropic receptor AMPA |
| | | type subunit 3, transcript variant 2, mRNA″ |
| ORM1 | 549 | Homo sapiens orosomucoid 1, mRNA″ |
| LYZ | 550 | Homo sapiens lysozyme, mRNA″ |
| SLC3A1 | 551 | Homo sapiens solute carrier family 3 member 1, |
| | | mRNA″ |
| CD36 | 552 | Homo sapiens CD36 molecule, transcript variant 3, |
| | | mRNA″ |
| ABAT | 553 | Homo sapiens 4-aminobutyrate aminotransferase, |
| | | transcript variant 2, mRNA″ |
| GABRA1 | 554 | Homo sapiens gamma-aminobutyric acid type A |
| | | receptor alphal subunit, transcript variant 1, mRNA″ |
| GABRG2 | 555 | Homo sapiens gamma-aminobutyric acid type A |
| | | receptor gamma2 subunit, transcript variant 2, |
| | | mRNA″ |
| SERPINA1 | 556 | Homo sapiens serpin family A member 1, transcript |
| | | variant 1, mRNA″ |
| MYL2 | 557 | Homo sapiens myosin light chain 2, mRNA″ |
| GABRB1 | 558 | Homo sapiens gamma-aminobutyric acid type A |
| | | receptor betal subunit, mRNA″ |
| TECRL | 559 | Homo sapiens trans-2,3-enoyl-CoA reductase like, |
| | | mRNA″ |
| MTUS1 | 560 | Homo sapiens microtubule associated scaffold protein |
| | | 1, transcript variant 1, mRNA″ |
| KRT14 | 561 | Homo sapiens keratin 14, mRNA″ |
| NOS2 | 562 | Homo sapiens nitric oxide synthase 2, mRNA″ |
| ATP1A2 | 563 | Homo sapiens ATPase Na+/K+ transporting subunit |
| | | alpha 2, mRNA″ |
| IFNA2 | 564 | Homo sapiens interferon alpha 2, mRNA″ |
| ALDOB | 565 | Homo sapiens aldolase, fructose-bisphosphate B , |
| | | mRNA″ |
| ACAT1 | 566 | Homo sapiens acetyl-CoA acetyltransferase 1 , |
| | | mRNA″ |
| STXBP1 | 567 | Homo sapiens syntaxin binding protein 1, transcript |
| | | variant 2, mRNA″ |
| HTN3 | 568 | Homo sapiens histatin 3, mRNA″ |
| NHSL2 | 569 | Homo sapiens NHS like 2, mRNA″ |
| LRTM2 | 570 | Homo sapiens leucine rich repeats and transmembrane |
| | | domains 2, transcript variant 1, mRNA″ |
| GABRA5 | 571 | Homo sapiens gamma-aminobutyric acid type A |
| | | receptor alpha5 subunit, transcript variant 1, mRNA″ |
| RRM2 | 572 | Homo sapiens ribonucleotide reductase regulatory |
| | | subunit M2, transcript variant 2, mRNA″ |
| EVI2A | 573 | Homo sapiens ecotropic viral integration site 2A, |
| | | transcript variant 1, mRNA″ |
| MOG | 574 | Homo sapiens myelin oligodendrocyte glycoprotein, |
| | | transcript variant alpha3, mRNA″ |
| AMPD1 | 575 | Homo sapiens adenosine monophosphate deaminase |
| | | 1, transcript variant 1, mRNA″ |
| SAR1B | 576 | Homo sapiens secretion associated Ras related |
| | | GTPase 1B, transcript variant 1, mRNA″ |
| TFG | 577 | Homo sapiens TRK-fused gene, transcript variant 2, |
| | | mRNA″ |
| TTYH1 | 578 | Homo sapiens tweety family member 1, transcript |
| | | variant 2, mRNA″ |
| GC | 579 | Homo sapiens vitamin D binding protein (GC), |
| | | transcript variant 1, mRNA″ |
| CXCL8 | 580 | Homo sapiens C-X-C motif chemokine ligand 8 , |
| | | transcript variant 1, mRNA″ |
| ACSL6 | 581 | Homo sapiens acyl-CoA synthetase long chain family |
| | | member 6, transcript variant 2, mRNA″ |
| DLGAP1 | 582 | Homo sapiens DLG associated protein 1, transcript |
| | | variant 2, mRNA″ |
| NTRK3 | 583 | Homo sapiens neurotrophic receptor tyrosine kinase |
| | | 3, transcript variant 3, mRNA″ |
| MSMO1 | 584 | Homo sapiens methylsterol monooxygenase 1 , |
| | | transcript variant 2, mRNA″ |
| HPGD | 585 | Homo sapiens 15-hydroxyprostaglandin |
| | | dehydrogenase, transcript variant 1, mRNA″ |
| PDLIM5 | 586 | Homo sapiens PDZ and LIM domain 5, transcript |
| | | variant 2, mRNA″ |
| CLEC2D | 587 | Homo sapiens C-type lectin domain family 2 member |
| | | D, transcript variant 2, mRNA″ |
| G6PC | 588 | Homo sapiens glucose-6-phosphatase catalytic |
| | | subunit, transcript variant 1, mRNA″ |
| C6orf58 | 589 | Homo sapiens chromosome 6 open reading frame 58 , |
| | | mRNA″ |
| DNAJB14 | 590 | Homo sapiens DnaJ heat shock protein family (Hsp40) |
| | | member B14, transcript variant 1, mRNA″ |
| ADH1B | 591 | Homo sapiens alcohol dehydrogenase 1B (class I), |
| | | beta polypeptide, transcript variant 1, mRNA″ |
| DNM1 | 592 | Homo sapiens dynamin 1, transcript variant 2, |
| | | mRNA″ |
| DPP6 | 593 | Homo sapiens dipeptidyl peptidase like 6, transcript |
| | | variant 3, mRNA″ |
| NTRK2 | 594 | Homo sapiens neurotrophic receptor tyrosine kinase |
| | | 2, transcript variant b, mRNA″ |
| RUFY3 | 595 | Homo sapiens RUN and FYVE domain containing 3, |
| | | transcript variant 1, mRNA″ |
| GRIN2A | 596 | Homo sapiens glutamate ionotropic receptor NMDA |
| | | type subunit 2A, transcript variant 2, mRNA″ |
| GJA1 | 597 | Homo sapiens gap junction protein alpha 1, mRNA″ |
| GH1 | 598 | Homo sapiens growth hormone 1, transcript variant 1, |
| | | mRNA″ |
| MYH7 | 599 | Homo sapiens myosin heavy chain 7, mRNA″ |
| PLP1 | 600 | Homo sapiens proteolipid protein 1, transcript variant |
| | | 1, mRNA″ |
| AMY2A | 601 | Homo sapiens amylase, alpha 2A (pancreatic), |
| | | mRNA″ |
| ERMN | 602 | Homo sapiens ermin, transcript variant 1, mRNA″ |
| FGG | 603 | Homo sapiens fibrinogen gamma chain, transcript |
| | | variant gamma, mRNA″ |
| APOA1 | 604 | Homo sapiens apolipoprotein A1, transcript variant 1, |
| | | mRNA″ |
| FGA | 605 | Homo sapiens fibrinogen alpha chain, transcript |
| | | variant alpha-E, mRNA″ |
| GPM6B | 606 | Homo sapiens glycoprotein M6B, transcript variant 4, |
| | | mRNA″ |
| DSP | 607 | Homo sapiens desmoplakin, transcript variant 2, |
| | | mRNA″ |
| OPCML | 608 | Homo sapiens opioid binding protein/cell adhesion |
| | | molecule like, transcript variant 2, mRNA″ |
| ALOX5 | 609 | Homo sapiens arachidonate 5-lipoxygenase, transcript |
| | | variant 1, mRNA″ |
| APLP1 | 610 | Homo sapiens amyloid beta precursor like protein 1, |
| | | transcript variant 1, mRNA″ |
| PNLIP | 611 | Homo sapiens pancreatic lipase, mRNA″ |
| ALB | 612 | Homo sapiens albumin, mRNA″ |
| GABRA2 | 613 | Homo sapiens gamma-aminobutyric acid type A |
| | | receptor alpha2 subunit, transcript variant 1, mRNA″ |
| MGP | 614 | Homo sapiens matrix Gla protein, transcript variant 2, |
| | | mRNA″ |
| CXCR4 | 615 | Homo sapiens C-X-C motif chemokine receptor 4, |
| | | transcript variant 1, mRNA″ |
| RBFOX2 | 616 | Homo sapiens RNA binding fox-1 homolog 2, |
| | | transcript variant 1, mRNA″ |
| IGSF11 | 617 | Homo sapiens immunoglobulin superfamily member |
| | | 11, transcript variant 2, mRNA″ |
| IGFBP1 | 618 | Homo sapiens insulin like growth factor binding |
| | | protein 1, mRNA″ |
| KCNJ5 | 619 | Homo sapiens potassium voltage-gated channel |
| | | subfamily J member 5, transcript variant 1, mRNA″ |
| PAH | 620 | Homo sapiens phenylalanine hydroxylase, transcript |
| | | variant 1, mRNA″ |
| APOC3 | 621 | Homo sapiens apolipoprotein C3, mRNA″ |
| WT1 | 622 | Homo sapiens Wilms tumor 1, transcript variant A, |
| | | mRNA″ |
| | 623 | Homo sapiens CREB gene, exon Y″ |
| | 624 | Human mRNA upregulated during camptothecin- |
| | | induced apoptosis of U937 cells |
| | 625 | Homo sapiens unknown protein mRNA, partial cds″ |
| | 626 | Homo sapiens genomic DNA; cDNA |
| | | DKFZp586I1319 (from clone DKFZp586I1319) |
| | 627 | Homo sapiens clone IMAGE: 121662 mRNA sequence |
| | 628 | Homo sapiens genomic DNA; cDNA |
| | | DKFZp434F0728 (from clone DKFZp434F0728) |
| | 629 | Homo sapiens clone HQ0352 PRO0352 mRNA, |
| | | partial cds″ |
| | 630 | Homo sapiens genomic DNA; cDNA |
| | | DKFZp761G0924 (from clone DKFZp761G0924) |
| | 631 | Homo sapiens genomic DNA; cDNA |
| | | DKFZp434N2419 (from clone DKFZp434N2419) |
| | 632 | Homo sapiens hypothetical protein PRO2130 |
| | | (PRO2130), mRNA″ |
| | 633 | Homo sapiens cDNA FLJ11668 fis, clone |
| | | HEMBA1004705″ |
| | 634 | Homo sapiens cDNA FLJ11971 fis, clone |
| | | HEMBB1001208″ |
| | 635 | Homo sapiens cDNA FLJ12130 fis, clone |
| | | MAMMA1000251″ |
| | 636 | Homo sapiens cDNA: FLJ21527 fis, clone |
| | | COL05961″ |
| | 637 | Homo sapiens cDNA: FLJ21944 fis, clone |
| | | HEP04662″ |
| | 638 | Homo sapiens clone IMAGE: 297403, mRNA |
| | | sequence″ |
| | 639 | Synthetic construct Homo sapiens, clone |
| | | IMAGE: 3857181, mRNA″ |
| | 640 | Homo sapiens cDNA FLJ34300 fis, clone |
| | | FEBRA2006726″ |
| | 641 | Homo sapiens, clone IMAGE: 5440896, mRNA″ |
| | 642 | Homo sapiens cDNA clone IMAGE: 4793171 |
| | 643 | Homo sapiens cDNA clone IMAGE: 5285165 |
| | 644 | Homo sapiens cDNA clone IMAGE: 5301169 |
| | 645 | Homo sapiens mRNA; cDNA DKFZp686K13109 |
| | | (from clone DKFZp686K13109) |
| | 646 | Homo sapiens mRNA; cDNA DKFZp686J19109 |
| | | (from clone DKFZp686J19109) |
| | 647 | Homo sapiens cDNA FLJ26334 fis, clone HRT02648″ |
| | 648 | Homo sapiens cDNA FLJ45490 fis, clone |
| | | BRTHA2005831″ |
| NPM1 | 649 | Homo sapiens nucleophosmin 1, transcript variant 1, |
| | | mRNA″ |
| TP53 | 650 | Homo sapiens tumor protein p53, transcript variant 1, |
| | | mRNA″ |
| SEPT4 | 651 | Homo sapiens septin 4, transcript variant 1, mRNA″ |
| CPEB4 | 652 | Homo sapiens cytoplasmic polyadenylation element |
| | | binding protein 4, transcript variant 1, mRNA″ |

[0046] The candidate genes probes in Table 1 are hereinafter referred as “CM probes” or “the 652-gene transcription profiles.” In the following, all the statistical calculations are conducted through a processing module, which is a central processing unit (CPU). Specifically, the procedures of the present disclosure are described in detail below:

[0047] STEP 1. Construction of the Reference Gene Profiles for the Non-Cancer Tissue(s):

[0048] First, Step 1(a) is to extract the RNA expression levels of selected genes from the transcriptomic data derived from normal human tissues. Gene expression values from each organ were averaged from numerous persons in order to eliminate bias caused by single person. Therefore, 254 samples from thirty-nine different tissue origins are first selected from the datasets GSE1133, GSE2361 and GSE7307 to construct a training dataset. For this training dataset, the CEL files are acquired from GEO and then subjected to quality assessment by AffyQualityReport to remove poor quality arrays. The data passing quality-control is then subjected to the Robust Multichip Average (RMA, Irizarry R et al. Biostatistics 2003, 4(2):249-264) processing for data normalization. Both AffyQualityReport and RMA are obtained from the Bioconductor package in the R package. Following the standard preprocessing procedure, the transcriptomic data is subjected to further statistical and bioinformatics analyses.

[0049] Step 1(b) is to combine gene expression values for all the organs in test and build a gene-by-organ matrix as follows. The genes with high coefficient of variance across organs were selected for further analyses.

| | Gene | Organ | | | | | | |
|---|---|---|---|---|---|---|---|---|
| No. | Name | Liver | Lung | Breast | Colon | . . . | . . . | others |
| 1 | A | 2.3 | 2.3 | 1.3 | 0.5 | | | |
| 2 | B | 1.3 | 5.7 | 0.7 | 2.1 | | | |
| 3 | C | 4.1 | 0.4 | 1.3 | 5.0 | | | |
| . . . | . . . | . . . | . . . | . . . | . . . | . . . | . . . | . . . |

[0050] Step 1(c) is to perform a hierarchical clustering analysis with the gene-by-organ matrix to evaluate its effect on the tissue classification as FIG. 1 shows. Following the hierarchical cluster analysis, one representative gene for each cluster is selected and additional genes with highly similar expression profiles are removed. Such procedure results in the CM probes or the 652-gene transcription profiles as Table 1 shows.

[0051] The hierarchical cluster formula is as follows:

$$r = \frac{{\sum }_{i = 1}^{n} ( {X}_{i} - \overline{X} ) ( {Y}_{i} - \overline{Y} )}{\sqrt{{\sum }_{i = 1}^{n} {( {X}_{i} - \overline{X} )}^{2}} \sqrt{{\sum }_{i = 1}^{n} {( {Y}_{i} - \overline{Y} )}^{2}}}$$

[0052] Step 1(d) is to further validate tissue prediction by using independent datasets to make sure the expression profile of the selected genes adequately represents the designated organ at the normal state. Briefly, the expression values of the selected genes were extracted from each sample of the validation test to build an expression profile of the sample. The expression profile of the sample was then compared against the non-cancerous profiles from each of our collection of normal reference organs with an in-house program by computing the Pearson correlation coefficient between the sample profile and that from the non-cancer reference which was incorporated into the k-nearest neighbor (i.e., KNN) based tissue prediction program. The tissue with the highest coefficient of correlation (k=1) will be selected for the prediction.

[0053] The k-nearest neighbor formula is as follows:

$$S i m ( {d}_{i} , {d}_{j} ) = \frac{{\sum }_{k = 1}^{M} {W}_{i k} \times {W}_{j k}}{\sqrt{( {\sum }_{k = 1}^{M} {W}_{i k}^{2} ) ( {\sum }_{k = 1}^{M} {W}_{j k}^{2} )}}$$

[0054] Step 1(e) is to perform the repetitive gene-replacement in the reference list to improve the tissue classification until the outcome was satisfied. Any change in the constituent gene of the marker will result in a new run of reference profile construction. After completing all the above steps, the 652-gene transcription profile representing the organ at non-cancerous state is produced.

[0055] Again, it is worth noting that the tissue used in STEP 1(a) to 1(e) is a normal tissue with known organ but without any abnormal/disease tissue. Furthermore, in some embodiment, the said normal tissue with known organ can be extract or isolated from a subject (e.g., human) having or not having a cancer.

[0056] STEP 2. Measuring the Expression Levels of the “652-Gene Transcription Profile” in the Tumor Specimens in Test:

[0057] Step 2 (a) is to remove the tumor biopsy test sample from the patient and further extract the total RNA thereof through the currently available molecular biology technology.

[0058] Similar to STEP 1, Step 2 (b) is to determine the RNA expression level of the 652-gene transcription profile from the test sample in Step 2 (a) by applying the currently available molecular biology techniques (e.g., probe hybridization on a DNA microarray, hybridization on magnetic beads, rtPCR, or direct sequencing). Optionally, the expression level of the test sample can be further transformed into a list of numerical desire values representing the selected genes expression levels by applying a transforming process (e.g., data processing, data extraction and data re-formatting) and using a processing module (e.g., a central processing unit (CPU)).

[0059] STEP 3. Assessing the Pathological State of a Tumor Sample to Determine Whether it is a Normal/Benign or Malignant Tumor, or Whether it is a Primary or a Distantly Metastasized Tumor.

[0060] The similarity or dissimilarity (dissimilarity degree can be mathematically converted from a similarity degree) is measured on the expression levels of the selected genes between the sample tissue and the normal reference as described in STEP 1. In one embodiment, we use similarity score (e.g. the CM score). Further, because the CM score value is between 0 and 1, similarity or dissimilarity score can be calculated trough the following formula: (a) similarity degree=(CM score/1)*100; and (b) dissimilarity degree=1−similarity score. It is worth to know that the two subjects in comparison is identical when the similarity degree is 100%, and the two subjects in comparison is identical when the dissimilarity degree is 0%. However, the following two points are worth noting.

[0061] (1) These recorded expression values of genes were then subjected to computer processing which calculates the similarity between the sample gene profile and the reference gene profile to produce a CM score for the sample. The CM score here is based on the Pearson's correlation coefficient with the formula shown below:

$$r = \frac{n ( \sum xy ) - ( \sum x ) ( \sum y )}{\sqrt{[ n ( \sum {x}^{2} ) - {( \sum x )}^{2} ] [ n ( \sum {y}^{2} ) - {( \sum y )}^{2} ]}}$$

(Note: n indicated the number of genes used as the marker, x represents the gene expression values from the tested sample and y represents that from the reference.)

[0062] The calculation method (i.e., CM algorithm) for the similarity or distance between the expression profile from sample and that from reference is not limited to Pearson correlation. In some other embodiment, the method used to calculate the similarity or distance includes but are not limited to Spearman's rank correlation coefficient, Kendall, Mahalanobis distance, Euclidean distances, etc.

[0063] (2) Comparison of the CM score with the cutting score and the corresponding prediction is shown in Table 2 as follows.

TABLE 2

| CM score | Similarity | Dissimilarity | Prediction |
|---|---|---|---|
| >0.8 | >80% | <20% | Normal or benign tumor |
| 0.3-0.8 | 30-80% | 20-70% | Primary cancer |
| <0.3 | <30% | >70% | Distant metastatic cancer |

[0064] Further, the CM score is generated from the process of comparison in the Similarity-Based Mode and/or Distance-Based Mode. Specifically, in the Similarity-Based Mode, the higher the score is, the more similar the sample expression is to the “reference expression profile,” thereby inferring that the sample has a higher probability to be a benign or normal tissue. In the Distance-Based Mode, the higher the score is, the less similar the sample expression is to the “reference expression profile”, thereby inferring that the sample has a higher probability to be a malignant tumor.

[0065] Moreover, to classify whether the sample tissue is malignant or cancerous, the score is compared against the cut-off score which has been determined with either experimental or statistical methods (e.g. ROC, receiver's operation curve) or both.

[0066] For similarity-based scoring system, cut-offs A and B are established. Furthermore, score A is higher than score B. Score A provides significant sensitivities and specificities in separating primary cancer from normal tissue while score B provides significant sensitivities and specificities in separating primary cancer from metastatic cancer. In practice, if the sample score is lower than A but higher than B, the sample is predicted as a primary cancer; if the sample score is higher than A, the sample is predicted as a normal or benign tumor; and if the sample score is lower than B, the sample is predicted as a metastatic cancer.

[0067] For the distance-based scoring system, cut-offs C and D are established. Furthermore, score C is lower than score D. If the sample score is lower than D but higher than C, the sample is predicted as a primary cancer; if the sample score is lower than C, the sample is predicted as the normal or benign tumor; and if the sample score is higher than D, the sample is predicted as a metastatic cancer.

[0068] Accordingly, “the cells type identification method” in the present disclosure consists of three steps (i.e., STEP 1 to 3). First, STEP 1 is to generate the candidate genes (i.e., the CM probes or the 652-gene transcription profiles) listed in Table 1. Next, STEP 2 is to determine the expression of the candidate genes in the test sample. Finally, evaluate the CM scores of the test sample and then predict whether the cell type of the test sample is a normal cell/benign tumor cell, a primary tumor cell or a metastatic cell. As discussed above, the entire process/method of the present disclosure may be summarized to include the following steps: (1) Selecting candidate genes with high CV (coefficient of variance) from a normal sample without comparing to a disease sample, and the number of selected genes ranged from 20 to 652; (2) Validating the candidate genes expression with hierarchical clustering and tissue prediction; (3) Selecting the representative nucleotide fragments (e.g., for example, for the cDNA microarray, about 19 to 100 base pair long gene-specific fragments were designed for each selected gene and about 15 bases long oligonucleotides for primers of real time PCR) of the candidate genes according to the requirement of the RNA quantitation methods and further generating CM probes; (4) Determining the candidate genes expression level of a test sample by using the CM probes with the current available molecular biology techniques; (5) Calculating the CM score of the test sample based on the CM algorithm; (6) Predicting the cell type of the test sample based on the CM score.

[0069] In one embodiment, the present disclosure also provides a system used to develop a plurality of candidate probes to identify a cell type in a mammalian subject. Specifically, the system includes a detecting chip and a processing module, both of which are electrically connected to each other. The detecting chip contains a plurality of selected probes, which can bind a plurality of polynucleotide sequences selected from any one of SEQ ID No.1 to 652 or from any fragment of SEQ ID No.1 to 652, and detect a test sample array's expression level obtained from a mammalian subject that may or may not have a selected disease, disorder, genetic disorder. The processing module analyses the test sample array's expression level and further generates a score for the test sample. Further, the processing module can predict a cell type for the test sample based on the score of the test sample.

[0070] In one embodiment, the detecting chip used to identify the primary sites is a microarray chip or magnetic beads. In another embodiment, the processing module used to compare the plurality gene expressions or to develop the array containing the candidate probes is a central processing unit (CPU).

[0071] In one embodiment, the standard sample used to develop the selected probes includes blood, blood plasma, serum, urine, tissue, cells, organs, seminal fluids or any combination thereof. In another embodiment, the selected disease, disorder or genetic disorder includes hematologic malignancies or solid tumors.

### EXAMPLE 1

[0072] In the following, all the statistical calculations are conducted through a processing module, which is a central processing unit (CPU). The candidate genes probes (i.e., CM probes) used in Example 1 are narrow down to 50 or 56 genes selected from Table 1.

[0073] Materials and Methods

[0074] Tissues and Patients

[0075] Samples were collected with consent at the Tzuchi hospital in Hualian of Taiwan. Thirteen samples were obtained from thirteen patients who were subjected to surgical removal of the suspected malignant tumors in liver. Upon resection, tissue samples were immediately immersed into liquid nitrogen followed by RNAlater processing for later RNA extraction. The total RNA of normal liver from an Asian male adult was purchased from BioChain.

[0076] Microarray Hybridization

[0077] Total RNA extracted from the tumor samples with Quiagen RNAeasy was hybridized to the Affymetrix HG-U133 plus2.0 genechips following the manufacturer's standard protocol. Affymetrix HG-U133 plus2.0 contains 54,675 probe sets, representing around 38,572 unique UniGene clusters.

[0078] Datasets and Normalization

[0079] For the six GEO series to re-confirm the capability of the 56 genes “i.e, the CM probe” in characterizing a specific normal human organ/tissue, keyword search is carried out using the GEO database to generate a group of microarray datasets which were derived from Affymetrix GeneChip HG-U133 plus2.0 and composed of samples from both normal and cancerous tissues, that is, the first two of the five criteria described in the result session. The abstracts of those candidate GEO series were then read one by one in a random order to single out those qualified with the other three criteria described in the text. The search is stopped when the sixth qualified GEO series is found for the purpose of re-confirmation.

[0080] The test dataset used in Table 3 was constructed by pooling the six newly retrieved GEO series described above and the subset specific for cancer-study from the dataset previously used for large-scale validation analysis. The latter contained all the retrievable microarray data series (specified with prefix GSE in the GEO database) which were performed on the Affymetrix GeneChips HG133A or HG133plus2.0 and contained normal human samples from the twenty-four analyzable organs/tissue. The 24 normal tissues include kidney, skin, liver, lung, trachea, skeletal muscle, heart, bone marrow, thymus, pancreas, pituitary gland, salivary gland, placenta, uterus, ovary, prostate, skin, testis, amygdala, thalamus, cerebellum, spinal cord, fetal liver, fetal brain and thyroid.

[0081] All the GSE series used in this study with CEL files available were downloaded from the GEO website and were pre-processed with RMA in the Bioconductor package.

[0082] Assay Kit and Signal Detection

[0083] The QuantiGene assay kit was custom-made by Affymetrix Inc. upon the request by Mao-Ying Inc. Each sample was assayed in duplicates for confirmation and was processed following the standard protocol. At the end of each assay, the hybridization signals were detected with the Luminex® 100/200™.

[0084] Data Analysis/Tissue Prediction

[0085] The expression profiles of a designated gene set (the marker) had been constructed for each of the 24 normal organs/tissues as previously described. Briefly, the expression level of each gene of the marker was extracted from the whole-genome microarray data performed on normal human tissue of a designated organ. To see how similar a tissue specimen is to its normal counterpart, expression levels of the marker in the sample were also obtained from the sample for test. The Pearson's correlation coefficient (cf, equivalent to CM score in the present study) was then computed between these two lists of gene expression values. The Pearson correlation was carried out with a computer program implemented with the R language.

[0086] Statistical Analysis

[0087] The statistical analyses including standard deviation, P values of the student's t test were computed using the excel program. The P values of the student's t test in the Table 4 were calculated with parameters set at one tail and type 3.

[0088] Results

[0089] 1. Consistent Transcription Profiles for the Normal Organs/Tissues

[0090] The tissue-prediction assays were repeated on several newly obtained datasets to re-confirm the previous disclosure by Hwang et al. Six datasets as shown in Table 3 were selected from the public database Gene Expression Omnibus (GEO, http://www.ncbi.nlm.nih.gov/geo/) with the following criteria:
[0091] (1) There were samples from both normal and cancerous tissues.
[0092] (2) The data were obtained from the experiments as performed on the Affymetrix GeneChips.
[0093] (3) There were specimens from the 24 types of organs/tissues, which were detectable by the CM algorithm.

TABLE 3
“Prediction of normal human organ/tissue by the 56-gene profiles”

| | | Number of | Number of | |
|---|---|---|---|---|
| | Number of | correct | wrong | |
| GSE | normal tissue | prediction | prediction | Tissue type |
| GSE15605 | 16 | 16 | 0 | Skin |
| GSE19804 | 59 | 59 | 0 | Lung |
| GSE27262 | 25 | 25 | 0 | Lung |
| GSE60542 | 30 | 30 | 0 | Thyroid |
| GSE62232 | 10 | 10 | 0 | Liver |
| GSE65144 | 13 | 13 | 0 | Thyroid |
| Total | 153 | 153 | 0 | |

[0094] The above six datasets of microarray experiments were used, including tissue samples from human skin, lung, thyroid and liver. Further, all 153 samples from normal organs/tissues in the six datasets were predicted correctly as Table 3 shows. This result is consistent with the previous finding, indicating that the expression profiles of the selected genes form the stable molecular features of a non-diseased human organ/tissue.

[0095] 2. CM Profiles Differentiate Cancerous Tissues from Normal

[0096] A scoring system, the CM score, was designed which stands for “cancer malignancy score” reflecting the similarity/dissimilarity degree of the expression profile between the tested sample and the reference profile of the corresponding normal tissue. In the present disclosure, the CM score is equivalent to the correlation coefficient of Pearson's correlation. The Spearman's rank correlation coefficient was also tested and it showed the same result (data not shown).

[0097] In the past the tissue prediction tests usually provide less accuracy on cancerous tissues as compared to those on the normal tissues. Therefore, a test dataset was constructed based on the method and materials described above. The test dataset was made of transcriptomic data in twenty-seven independent GEO series derived from 927 cancerous and 340 normal samples covering kidney, liver, lung, ovary, prostate, skin, testis, and thyroid. Each array of the test dataset was computed for its CM score according to the procedure described previously. The higher the CM score is, the more the sample-in-test resembles its normal reference for the gene expression pattern.

[0098] To examine whether cancers are different from the normal on the 50 or 56 gene profiles, the average of the CM scores was taken for the group of cancer samples or the normal samples in each of the GSE datasets. As Table 4 discloses, it revealed that the averaged CM scores from the normal tissues were significantly higher than the cancers in all the tested GEO datasets, indicating a significant deviation of the cancer tissues from the normal for the overall expression profile of the marker genes. The averaged CM scores from the normal tissues were mostly above 0.80 with their standard deviations rarely going above 0.05, suggesting a good conservation of the expression pattern of the 56 genes in the normal tissue. Such expression pattern at a genomic level is tissue-specific and may be represented by a subset of the genes like the 56 genes for the 24 organs/tissues. This organ- or tissue-specific gene pattern is presented as a numerical formula among genes instead of the fold-change of overexpression or underexpression relative to a control gene.

[0099] In contrast, the averaged CM scores from the cancer distributed over a wider range and their deviations were higher than the normal. This phenomenon indicated that the overall gene expression pattern in the cancerous tissue was not similar to the normal reference. The wide range of the CM scores from a malignant tumor, indicating a big variety of gene expression patterns, may reflect the heterogeneous cancer cells in the tumor, an expected outcome of the multiple mutations existing in the cancer cells.

[0100] 3. Difference Between Normal and Cancers Applied to Individual Samples

[0101] Though the cancer samples as a group exhibited significantly lower CM scores than their normal controls (see FIG. 2 and Table 4), it was not clear whether such difference was contributed by a small proportion of the tested samples or by the majority of them. We therefore sampled a few datasets from Table 4 to closely examine the CM scores of each individual sample. The datasets selected for such purpose included GSE10072 containing forty-nine normal and fifty-eight lung cancer samples, GSE15641 twenty-three normal and sixty-nine kidney cancer samples, GSE19804 sixty normal and sixty cancer samples, GSE6008 four normal and ninety nine ovary cancers, GSE62232 ten normal and eighty one liver cancer samples, and GSE65144 thirteen normal and twelve cancer samples.

TABLE 4

| | Numbers | | Numbers | | | |
|---|---|---|---|---|---|---|
| | of | | of | | | |
| | Cancer | CM scores | Normal | CM scores | t-Test | |
| Series_ID | Sample | (Tumor) | Sample | (Normal) | (p-value) | Note |
| GSE10072 | 58 | 0.67 ± 0.08 | 49 | 0.88 ± 0.04 | 3.08E−30 | Adenocarcinoma of lung |
| GSE10799 | 16 | 0.57 ± 0.08 | 3 | 0.83 ± 0.02 | 1.75E−09 | pulmonary |
| | | | | | | adenocarcinoma |
| GSE11151 | 62 | 0.58 ± 0.13 | 3 | 0.86 ± 0.01 | 4.28E−25 | various types of kidney |
| | | | | | | cancer |
| GSE12606 | 6 | 0.51 ± 0.07 | 4 | 0.71 ± 0.08 | 0.0143 | RCC |
| GSE15605 | 58 | 0.58 ± 0.17 | 16 | 0.76 ± 0.03 | 1.90E−11 | skin; cf (metastatic = 0.4; |
| | | | | | | primary = 0.62) |
| GSE15641 | 69 | 0.63 ± 0.1 | 23 | 0.87 ± 0.07 | 1.33E−19 | 5 types of kidney cancer |
| GSE17906 | 5 | 0.75 ± 0.06 | 5 | 0.81 ± 0.02 | 0.045 | Prostate cancer |
| GSE19804 | 60 | 0.7 ± 0.09 | 60 | 0.85 ± 0.05 | 2.69E−20 | Non-small cell lung cancer |
| GSE2503 | 5 | 0.75 ± 0.05 | 6 | 0.84 ± 0.03 | 0.011 | squamous cell carcinoma |
| GSE27262 | 25 | 0.69 ± 0.05 | 25 | 0.86 ± 0.03 | 1.36E−16 | stage I lung |
| | | | | | | adenocarcinoma |
| GSE29721 | 10 | 0.64 ± 0.13 | 10 | 0.79 ± 0.06 | 0.0025 | Hepatic cellular carcinoma |
| GSE3218 | 101 | 0.34 ± 0.16 | 5 | 0.94 ± 0.01 | 3.44E−62 | Various types of testis |
| | | | | | | cancer |
| GSE3268 | 5 | 0.57 ± 0.05 | 5 | 0.94 ± 0.01 | 1.09E−05 | Squamous cell lung cancer |
| GSE3467 | 9 | 0.81 ± 0.04 | 9 | 0.86 ± 0.03 | 0.0063 | Papillary Thyroid Cancer |
| GSE3678 | 7 | 0.65 ± 0.03 | 7 | 0.7 ± 0.03 | 0.00326 | Papillary Thyroid Cancer |
| GSE43346 | 23 | 0.41 ± 0.12 | 1 | 0.87 | N.A. | small cell lung cancer |
| GSE4587 | 9 | 0.53 ± 0.2 | 6 | 0.79 ± 0.02 | 0.00332 | Melanoma |
| GSE5364-liver | 9 | 0.46 ± 0.16 | 8 | 0.85 ± 0.03 | 1.04E−05 | Primary liver cancer |
| GSE5364-lung | 18 | 0.61 ± 0.13 | 12 | 0.81 ± 0.03 | 1.52E−06 | Primary lung cancer |
| GSE5364-thyroid | 35 | 0.74 ± 0.06 | 16 | 0.81 ± 0.03 | 1.82E−06 | Primary thyroid cancer |
| GSE6004 | 14 | 0.82 ± 0.04 | 4 | 0.88 ± 0.03 | 0.0055 | Papillary Thyroid Cancer |
| GSE6008 | 99 | 0.32 ± 0.1 | 4 | 0.86 ± 0.04 | 2.65E−07 | ovarian tumor: serous |
| GSE60542 | 35 | 0.74 ± 0.06 | 30 | 0.82 ± 0.04 | 4.11E−08 | papillary thyroid cancer |
| | | | | | | (PTC): primary tumors and |
| | | | | | | metastases |
| GSE62232 | 81 | 0.76 ± 0.07 | 10 | 0.88 ± 0.02 | 3.27E−16 | Hepatocellular carcinoma |
| GSE6280 | 14 | 0.58 ± 0.12 | 2 | 0.86 ± 0.03 | 0.0002 | various types of kidney |
| | | | | | | cancer |
| GSE65144 | 12 | 0.37 ± 0.12 | 13 | 0.79 ± 0.05 | 1.21E−08 | anaplastic thyroid |
| | | | | | | carcinoma |
| GSE7553 | 82 | 0.53 ± 0.23 | 4 | 0.86 ± 0.06 | 6.93E−06 | Various types of melanoma |
| Total | 927 | | 340 | | | |

[0102] As FIG. 3 shows, the CM scores from each of the six analyzed datasets formed two major groups based on the CM score distributions, one higher group from the normal samples located in the higher CM score area and another lower group representing the cancer samples sitting at the lower CM score area. The two groups in all the tested datasets were so clearly separable that one could easily determine a cutting point of the score to differentiate the two types of tissues.

[0103] 4. CM Score Worked Well with the Marker of Different Gene Combinations

[0104] To demonstrate that the CM score could differentiate cancers from non-cancers, meta-analysis was performed on four of the whole-genome gene-expression datasets acquired from GEO (e.g., Gene Expression Omnibus), which is a public database for gene expression. The criteria to select the datasets for test included firstly, the datasets should represent different organs, and secondly, the datasets should contain samples from both normal tissues and cancers. The datasets selected for such purpose are shown in Table 5 and include GSE10072 containing forty-nine normal samples and fifty-eight lung cancer samples, GSE11151 containing five normal samples and sixty-two kidney cancer samples, GSE6008 containing four normal samples and ninety nine ovary cancers, and GSE65144 containing thirteen normal samples and twelve thyroid cancer samples. Each data set was designated with the GEO accession number with a prefix GSE. The organs where the tumors were sampled were denoted in the parenthesis following the accession number of the dataset. Three combinations of genes were used as the markers to carry out the cancer/non-cancer discrimination. In addition to gene content, each of the three markers consisted of different number of genes, as indicated in Table 5.

[0105] Taking FIG. 3 for a reference, a cutting score at 0.8 was selected for each of four datasets to differentiate cancer from non-cancer tissue. A non-cancer (or normal) tissue would give CM score higher than 0.8 (i.e., similarity higher than 80% or dissimilarity lower than 20%) while a cancer tissue would provide a score lower than 0.8 (i.e., similarity lower than 80%, or dissimilarity higher than 20%). The sensitivities (Sensitivity=true positives/(true positive+false negative)) and specificities (Specificity=true negatives/(true negative+false positives)) of the four datasets were computed and the results are shown in Table 5: the accuracies, sensitivities and specificities for all the four datasets were all high.

[0106] According to the results of FIG. 3 and Table 5, it can be concluded: (1) the CM score difference which had been observed at the large-scale analysis (see Table 4) was contributed by the majority of individual samples in analysis instead of by a proportion of “significant”-valued samples; (2) the malignant tumors did exhibit significant difference in their global gene expression pattern from their mother organ; and (3) such feature could have a great potential to be developed into an objective cancer diagnostics in the majority of individual cases to facilitate diagnosis of cancers.

[0107] It appears in Table 5 that a score around 0.8 (i.e., similarity around 80% or dissimilarity around 20%) worked well to separate cancer and normal tissues in various organs, except thyroid.

[0108] Regarding the small overlaps between the CM score distributions of normal and that of cancer, it can be attributed to false positives and false negatives. For example, perhaps the normal samples (i.e., false positives) at the overlapping area were contaminated with the adjacent cancer cells, or the tumor content in the cancer sample was too low to be observed under microscope but sufficient to be picked up by molecular hybridization. One possibility for false negatives is that it may be out of the detection scope of the CM score to differentiate certain subtypes of cancers from their originated normal tissue.

[0109] 5. Applications of CM Probes to Clinical Samples

[0110] In order to learn how the CM scores may relate to the status of the cancers, the CM analysis was applied directly to clinical specimen through collaborating with surgical oncology department of Tzuchi Hospital in Hualian, Taiwan. Tissue samples of malignant tumors were obtained with informed consent from patients who had been diagnosed with cancer and subjected to resection at Tzuchi hospital. To expand the group of normal tissue, an RNA sample from “normal” liver purchased from BioChain Inc. was also included, producing a total of 27 samples consisting of 16 liver tumors, 7 normal livers, 2 pancreatic tumors, 1 thyroid tumor, and 1 normal thyroid specimen. Total RNA was extracted from each specimen following a standard protocol, and, after discarding unsuitable samples using a process of RNA quality control, the RNA was hybridized to arrays of Affymetrix HU133 plus2.0 GeneChip.

TABLE 5
“The sensitivities and specificities of normal/cancer separation when CM score
was set at 0.8 using different gene combinations as the cancer markers”

| | GSE10072 | | GSE6008 | | GSE11151 | | GSE65144 | |
|---|---|---|---|---|---|---|---|---|
| Marker | (Lung) | | (Ovary) | | (Kidney) | | (Thyroid) | |
| (cutoff) | Sensitivity | Specificity | Sensitivity | Specificity | Sensitivity | Specificity | Sensitivity | Specificity |
| 26 (0.8) | 100% | 92% | 100% | 100% | 100% | 100% | 100% | 69% |
| 29 (0.8) | 93% | 90% | 100% | 100% | 100% | 100% | 71% | 100% |
| 36 (0.8) | 86% | 98% | 100% | 100% | 100% | 100% | 100% | 69% |

[0111] The CM score was first computed for each sample. The corresponding pathological data from each patient was retrieved from the files at the hospital and was organized with the CM scores to produce the results in Table 6. The majority of normal samples exhibited a CM score of 0.79 or higher, whereas almost all the tumors exhibited CM scores lower than 0.81. The only tumor sample with a CM score significantly higher than 0.81 was sample (#100T), whose donor exhibited only very mild symptoms of liver cancer. Additionally, the liver cancer of patient (#100T) was classified as BCLC-A, indicating an early stage hepatocellular carcinoma. On the other hand, the normal sample #87 exhibited a CM score of 0.68, the lowest among all the normal specimens tested. Its matched tumor sample (#88T) happened to be included in this study and also exhibited the lowest CM score (0.55) among the 13 primary hepatocellular carcinoma (HCC) samples. The pathological report of sample (#88T) described a relatively severe malignancy compared with other HCC specimens. In summary, these results suggested a positive correlation between CM score value and tumor malignancy. It should be noted that the “normal” samples here, unlike normal references from non-diseased donors, were peripheral tissues of the organ with cancer. Therefore, it was not surprising that the CM scores of the normal samples did not exhibit all CM scores as high as those of healthy individuals.

[0112] Among the 27 samples, four of the tumor samples gave especially low CM scores, including three diagnosed as cholangiocarcinoma (sample #8T, #16T, and #386T) and one (sample #206T) as a solid pseudopapillary neoplasm of pancreatic cancer. These can be explained after considering that reference the 652-gene transcription profiles represent the gene expression status of normal tissue and that low CM scores indicate dissimilarity to this reference. Thus, although cholangiocarcinomas are found in the liver, they originate from the bile duct and so, by nature, are highly dissimilar to liver tissue and so exhibit very low CM scores when compared with the 652-gene transcription profile of normal liver. The solid pseudopapillary neoplasm of pancreatic cancer was an unusual form of pancreatic carcinoma and was the result of cell death induced by necrosis. The morphology and function of such a tumor, therefore probably only distantly resemble that of normal pancreas tissue, thereby leading to a low CM score when compared with normal pancreas.

[0113] Thus the results supported the hypothesis of the present disclosure.

[0114] 6. CM Score may Relate to Degrees of Malignancies of a Tumor

[0115] CM scores are also observed to possibly correlate with the degree of the malignancies of the tumor. For example, there are four datasets of skin cancer listed on Table 4. Three of them (i.e., GSE15605, GSE4587, and GSE7553) contained samples from melanoma, a highly aggressive and deadly type of skin cancer, while the other one GSE2503 from the squamous skin cancer which is mild compared with melanoma. The CM scores for the skin cancers in GSE2503 were higher than those from the melanoma in the other three datasets. Among the seven datasets from lung cancer, the lowest CM score occurred with small cell lung cancer, a quickly spreading and highly aggressive subtype of lung cancer compared to other subtypes. Similarly, among the six GEO series from the thyroid cancer, five of them from papillary thyroid cancer had CM scores nearly as high as those from their normal controls. The papillary thyroid cancer is the most common type of thyroid cancer and is known to be well-differentiated, slow-growing, and with good prognosis. While the GSE 65144 from anaplastic thyroid carcinoma is with a low CM score (0.37±0.12) for the cancer samples. The anaplastic thyroid carcinoma is a very aggressive but rarely found subtype of thyroid cancer. It has very poor prognosis and is resistant to most treatments. Taken together, the CM scores derived from these clinical specimens correlate with the cancer progression.

[0116] 7. Validation of CM Scores-Gene Marker on Magnetic Beads with Clinical Samples

TABLE 6
“The cancer characterization of clinical samples from Tzuchi hospital for microarray analysis”

| Sample ID | Organ | ref_organ | CM score | Diagnosis | Pathological_report |
|---|---|---|---|---|---|
| commercial | liver | liver | 0.85 | | commercial product, from a |
| | | | | | 60-year-old Asian male |
| | | | | | (BioChain, cat. no: |
| | | | | | R1234149-50-D01) |
| 263N | liver | liver | 0.86 | | well encapsulated, |
| | | | | | angiolymphatic invasion |
| 337N | liver | liver | 0.79 | distant normal of | mild tumor necrosis, partially |
| | | | | primary liver cancer | encapsulated with focal |
| | | | | | infiltrative border |
| 353N | thyroid | thyroid | 0.83 | | non-toxic multinodular goiter |
| 373N | liver | liver | 0.84 | | tumor necrosis, partially |
| | | | | | encapsulated with focal |
| | | | | | infiltrative border, |
| | | | | | angiolymphatic invasion |
| 393N | liver/cholangio- | liver | 0.82 | distant normal liver | mass-forming tumor growth; |
| | carcinoma | | | tissue of | non-tumoral liver tissue: non- |
| | | | | cholangiocarcinoma | cirrhotic |
| 87N | liver | liver | 0.68 | | mild tumor necrosis, |
| | | | | | angiolymphatic invasion, |
| | | | | | portal/hepatic vein |
| | | | | | thrombosis, non-encapsulated |
| | | | | | with infiltrative border |
| 99N | liver | liver | 0.87 | | non-encapsulated with |
| | | | | | infiltrative border |
| 206T | pancreas | pancreas | 0.21 | solid | tumor is confined to pancreas |
| | | | | pseudopapillary | |
| | | | | neoplasm of | |
| | | | | pancreatic cancer | |
| 16T | cholangiocarcinoma | liver | 0.32 | cholangiocarcinoma | cholangiocarcinoma; |
| | | | | | angiolymphatic invasion |
| 8T | cholangiocarcinoma | liver | 0.3 | cholangiocarcinoma | mild tumor necrosis, |
| | | | | | angiolymphatic invasion, |
| | | | | | non-encapsulated with |
| | | | | | infiltrative border |
| 386T | cholangiocarcinoma | liver | 0.4 | cholangiocarcinoma | mass-forming tumor growth, |
| | | | | | lymphatic vascular invasion |
| | | | | | (small vessel) |
| 88T | liver | liver | 0.55 | | mild tumor necrosis, |
| | | | | | angiolymphatic invasion, |
| | | | | | portal/hepatic vein |
| | | | | | thrombosis, non-encapsulated |
| | | | | | with infiltrative border |
| 340T | liver | liver | 0.67 | primary liver cancer | poorly differentiated, marked |
| | | | | | tumor necrosis, non- |
| | | | | | encapsulated with infiltrative |
| | | | | | border, angiolymphatic |
| | | | | | invasion, portal/hepatic vein |
| | | | | | thrombosis |
| 330T | liver | liver | 0.77 | primary liver cancer | mild tumor necrosis, partially |
| | | | | | encapsulated with focal |
| | | | | | infiltrative border, |
| | | | | | angiolymphatic invasion, |
| | | | | | portal/hepatic vein |
| | | | | | thrombosis |
| 400T | liver | liver | 0.74 | primary liver cancer | well differentiated; mild |
| | | | | | tumor necrosis, |
| | | | | | angiolymphatic invasion |
| | | | | | (positive in capsule), partially |
| | | | | | encapsulated with focal |
| | | | | | infiltrative border |
| 40T | liver | liver | 0.72 | primary liver cancer | tumor necrosis, |
| | | | | | angiolymphatic invasion, |
| | | | | | partially encapsulated with |
| | | | | | focal infiltrative border |
| 60T | pancrease head | pancrease | 0.72 | primary pancreatic | chronic pancreatitis with |
| | | | | cancer | massive fibrosis |
| 104T | thyroid | thyroid | 0.78 | benign thyroid | adenomatous goiter |
| | | | | tumor | |
| 36T | liver | liver | 0.76 | primary liver cancer | angiolymphatic invasion, |
| | | | | | partially encapsulated with |
| | | | | | focal infiltrative border |
| 30T | liver | liver | 0.78 | primary liver cancer | Well encapsulated with focal |
| | | | | | capsular invasion, angio- |
| | | | | | lymphatic invasion |
| 122T | liver | liver | 0.76 | primary liver cancer | partially encapsulated with |
| | | | | | focal infiltrative border, |
| | | | | | angiolymphatic invasion |
| 50T | liver | liver | 0.81 | primary liver cancer | moderate tumor necrosis, |
| | | | | | angiolymphatic invasion, |
| | | | | | portal/hepatic vein |
| | | | | | thrombosis, non-encapsulated |
| | | | | | with infiltrative border |
| 44T | liver | liver | 0.78 | primary liver cancer | angiolymphatic invasion, |
| | | | | | well encapsulated with focal |
| | | | | | capsular invasion |
| 384T | liver | liver | 0.82 | primary liver cancer | angiolymphatic invasion |
| 6T | liver | liver | 0.8 | primary liver cancer | angiolymphatic invasion, |
| | | | | | partially encapsulated with |
| | | | | | focal infiltrative border |
| 100T | liver | liver | 0.85 | primary liver cancer | non-encapsulated with |
| | | | | | infiltrative border |

[0117] According to Table 5 and Table 6, the cutoff CM score is implied to be around 0.8 to separate cancer from non-cancer and above 0.2 to discern primary from metastatic if using the Affymetrix microarrays for the mRNA quantitation. It is curious whether the same cutoff values may also be applicable if applying a different technological platform, such as magnetic beads. For verification, clinical specimens on the magnetic bead system were tested with the Quantigene plex 2.0, carried by the Affymetrix Inc. Tumor specimens were obtained from 32 patients who suffered from cancers at different organs including breast, colon, liver and pancreas (as Table 7 shows). The total RNA from the samples was hybridized to the probes of the 50 or 56 gene marker which had been pre-conjugated onto the magnetic beads. The output expression levels of each of the marker genes from individual specimens were computed to come up with the CM scores following the routine computational procedure described herein. It was found that all the primary cancer gave a score below 0.8 (i.e., below similarity 80%, or above dissimilarity 20%). When applying 0.2 (i.e., similarity 20% or dissimilarity 80%) as the cutoff value to differentiate primary from metastatic cancers, 100%, 95%, and 97% were obtained for sensitivity, specificity and accuracy, respectively (as Table 8 shows). The results agreed with the analyses of Table 6. The result showed that the score about 0.2 to 0.3 (i.e., similarity 20-30% or dissimilarity 70-80%) could work well as the cutoff on separation of primary cancer from metastatic cancers while RNA quantitation was performed on magnetic beads.

TABLE 7
“Summary of the clinical samples used
in the magnetic bead experiments”

| Anatomic site | Primary | Metastatic | Total |
|---|---|---|---|
| liver | 12 | 9 | 21 |
| colon | 6 | 0 | 6 |
| breast | 4 | 0 | 4 |
| pancreas | 0 | 1 | 1 |

TABLE 8
“CM score threshold at 0.2 can well discern metastatic
cancer from primary cancer when performing mRNA quantitation
on the magnetic beads”

| | Prediction | | |
|---|---|---|---|
| Diagnosis | >0.2 (Primary) | <0.2 (Metastatic) | Sensitivity: 100% |
| Primary | 21 | 1 | Specificity: 95% |
| Metastatic | 1 | 10 | Accuracy: 97% |

[0118] 8. Benign Tumors Gave High CM Scores

[0119] The papillary thyroid cancer (i.e., PTC), the common subtype of thyroid cancer, often exhibits quite benign characteristics: well-differentiated, slow growing, unlikely to invade blood vessels, good prognosis after treatment scores etc. As FIG. 4A shows, the CM scores of the PTC samples appeared quite close to those of the normal, reflecting the benign characteristics. While the anaplastic thyroid cancer (i.e., ATC), the aggressive subtype of thyroid cancer, showed significantly lower scores than either normal or PTC. It should be noted that the encapsulated follicular variant of papillary thyroid carcinoma (EFVPTC) has recently been reclassified and renamed into “non-invasive follicular thyroid neoplasm with papillary-like nuclear features” (NIFTP) to better reflect its biological and clinical characteristics to avoid over-treatment of the patients following an international, multidisciplinary and retrospective study. (Yuri E. Nikiforov, M D, PhD; Raja R. Seethala, MD; Giovanni Tallini, MD et al. JAMA Oncol. 2016; 2(8):1023-1029. doi:10.1001/jamaoncol.2016.0386).

[0120] Similar results were observed in other cancers. When applying the method of the present disclosure to the datasets (e.g., GSE13319) which contained benign tumors leiomyoma and the normal tissue myometrium of uterus, the CM scores from these two categories basically overlapped with each other as FIG. 4B shows, indicating the non-cancerous nature of the benign tumors. GSE13319 contained data from 50 samples of leiomyoma, benign tumors of uterine, in addition to 27 samples of the myometrium, the middle layer of a uterine. Following the expression profile analysis, the CM score distribution from leiomyoma almost overlapped with those for the myometrium. The averaged CM score for leiomyoma (0.71±0.04) and myometrium (0.73±0.03) were rather close to each other.

[0121] In summary, the present disclosure shows that a gene-based novel procedure was established for cancer diagnosis with five combinations of gene sets on two different experimental systems, using a high density gene expression microarray and a magnetic-bead assisted multi-gene expression system. This procedure returned a score, e.g., a CM score, by comparing the expression profile of selected genes (marker) from the specimen-in-test to that of a normal reference. The score in this example was the Pearson's correlation coefficient. There are two thresholds: the higher threshold at around 0.8 (i.e., the higher similarity threshold at around 80% or the lower dissimilarity threshold at 20%) and the lower at around 0.2 to 0.3 (i.e., the lower similarity threshold at around 20-30%, or the higher dissimilarity at around 70-80%). The tissue with CM score higher than the higher threshold would very likely be a normal tissue or benign tumor; lower than the first threshold but higher than the second would likely be a primary cancer; lower than the second threshold would likely be a metastatic cancer.

The application's sequence listing, which the Patent Office published only in electronic form, follows.

SEQUENCE LISTING (652 sequences)

SEQ ID NO: 1 - DNA, 2706 bp, Artificial Sequence
  FLJ14106
tgaaaatgtaaccagcagatgacgtttcttccatctcccttgcaggcacagggccatgggtgaccacggtggccgccgggaaccagcccaccctgatcgcacactcctatggagtggcccagcctcccaccttcagcccggctgtgaacgtccaggccccggtcattggggtgaccccctcactgcctccccacgtggggccccagctcccgctgatgccaggccactactcgctccctcagccgccctctcagccactgagcagcgtggtggtcaacatgcctgcccaggccctgtatgccagccctcagcccctggccgtgtccacactgcccggtgtggggcaggtggcccgcccaggacccaccgctgtgggcaacggccacatggcagggcccctgctgcctccaccgccgccagcccagccgtccgccactctccccagtggtgcccctgccaccaatgggccccccacaaccgactcggcccacgggctgcagatgctgcggaccattggcgtggggaagtatgagttcaccgacccggggcaccccagaggtaagtcctgctgccacgtgcctccccacgggcctgcgtctgcacctccctgcgcggtcactgcaacaccaccgggacagggggtgcttcatgccagctccttcactggcctccccaacccagaggctgcagtggagcctccacctgcccaagacaactggcctgagatgggggagggagggggaaggtgtggagggcgggacaaacaaagtgggaaaatgcgccggggtaagaagaggaaggaagggagagcctgcaaagcccagagcccgtccccctccagcccaagccctggccattctcacctccaacccccaaggccaggccaagctgcaaaagggtgagagtcatccactcctcttagggcaccgcagcagaacagtccctttgggggccttctccacattccatccatgaggacattcagagcatgtactgtgtccttcccagggaaggcactctctgtcgtgccatcggatgagagcactgtccacggcaaacagtctggcccaacggggtgtctacatctcttttgaaagaggacactagacggtcccagaaagtatgcatctctgggcacaacttcccagccttcccacataaaaccccttgagatggcatttcggggtgctctgcctttcggcagagcaaggaaccccactagccactctcctgtcttctctcccaagtctcttcctttgtcatttcaagcaattttcatgccttgtcaagcatcccaacaataaagctcatgtctggatctctgttgggtttaattcccaatctgactgagccctgactgcctttgttttggaaatcagcactagttttaaatgacaaaattgtagaaaattacatctaaattctggtaaactcttgctttaagatctttttttaaaaaatgactaaattgatttttttctttgcattgttttggttaagctctgtctccctttaaaaaaaaaaaaaaaaaagaaagaaagaaacttactcccagttcaagttcatgagttaccaactctgacaactgggcagcgggcatcctacttccaaggctatgccaaagcccaaggcaccgggtggcatattctgtccccacatagcccctctgggctaatgcaagatcttgctggcttgccacgttccaggcacgcatctaggaaaaggagctgttttgtgcaaaaaggtaactagctgagataggactggagtccctagtttggggctcagcaccaagctgggatctgccccaccaaagctgctgggtgcaggcagctaaacattgtcagccctgagcccatgagatcagaaagacacaggtggcggggacaggaccctgcaggacttctgtgcccactgggtcaatgaccattgcagagctgttcctgtaacctctgtgcaaggacctgagggtgtgaaccatcctctgtggtggtcctgagccaatggaagggaggggacaagaaataggggccctgctaagattccctctaccaggccccactgggcagaccgagggccaggtgtgagggccagggatggggtgggcctagaaagtgtcctcagccctgccttctggtgagccagcgggacccaccagctctagccagtgacaacaactgaccggtccatcaccctgatttccagaggttgccagcacactggctctttcctcgaaattccatgtaactcgcttctctatttacggcctcatcagctgatggagccccttatatttgcagggaagaaagagtgacgcacgcgcctacaaatgcctccaaactcaagcctgggtgggttttttctttttttaatatataagtaatttctcttttcatttctaatcttaaaagcctttattgctgaagctataatttgtctgtcagatctaatgtcaaacaactgcatattttttaaaataagaaacccgaattttgaaactaaatctttgaaacttgccatgtgagagtcgtgttcctgacaggaccacgtgggcttggatctgggtcacttttaattttgcccctagggattttacatctctgaagcccaattgatttcacactcctaaatgacagacagctggctccaggcaggaacaggaggctctgcgtgatggcgtcaacacaagtcagaactccactttag

SEQ ID NO: 2 - DNA, 883 bp, Artificial Sequence
  CSH2
cagggagagagaactggccagggtataaaaagggcccacaagagaccggctctaggatcccaaggcccaactccccgaaccactcagggtcctgtggacagctcacctagcggcaatggctgcaggctcccggacgtccctgctcctggcttttgccctgctctgcctgccctggcttcaagaggctggtgccgtccaaaccgttccgttatccaggctttttgaccacgctatgctccaagcccatcgcgcgcaccagctggccattgacacctaccaggagtttgaagaaacctatatcccaaaggaccagaagtattcattcctgcatgactcccagacctccttctgcttctcagactctattccgacaccctccaacatggaggaaacgcaacagaaatccaatctagagctgctccgcatctccctgctgctcatcgagtcgtggctggagcccgtgcggttcctcaggagtatgttcgccaacaacctggtgtatgacacctcggacagcgatgactatcacctcctaaaggacctagaggaaggcatccaaacgctgatggggaggctggaagacggcagccgccggactgggcagatcctcaagcagacctacagcaagtttgacacaaactcacacaaccatgacgcactgctcaagaactacgggctgctctactgcttcaggaaggacatggacaaggtcgagacattcctgcgcatggtgcagtgccgctctgtagagggtagctgtggcttctaggtgcccgcgtggcatcctgtgaccgacccctccccagtgcctctcctggccctggaaggtgccactccagtgcccatcagccttgtcctaataaaattaagttgtatcatttca

SEQ ID NO: 3 - DNA, 1235 bp, Artificial Sequence
  HLA-DRB6
gaatacagaatgtgggcaaactcgcttctgtgccggccgccagaaggtttgctgagggcaatcactccctggtgccgggctccttgaggttatgcactgggacatctagagcctattgtttgaggaatgcagtcttgcaagcctgctctggatcaagccacagactgaaacacccccgaagagcaagcacgtttcttggagcaggctaagtgtgagtgtcatatcttcaatgggatgaagcgggtgcagtacctgaacagatacatccataaacgggaggagaacctgcgcttcgacagcaacgtggaggagttccaggcagttacggaactggggcggcctgtcgcagagaactggaacagccagaagggcatcccggaggagaagcgggacaagatggacgactactgcagatacaattacggggttttttgagagcttcacagtgcagccgcgagtccatcctaaggtgactgtgtatcctgcaaagacccagcccctgcatcaccgcaaccccctggtcggctctgtgagtggtttctatccaggcagcattaaagtcaggtggttccagaatggtcaggaagagaaggctgcggtggtctccataggcctgatccagaatggagattggaccttccagaccctggtgatgctggaaacagttcctcggagtggagaggtttacacctgccaagtggagcatccaagcgtgacgagccctctcacagtggaatggagtacacggactgaatctgcacagagcaagatgctgagtggagtcgggggctttgtgctgggcctgctcttccttgggacagggctgttcatctacttcaggaatcagaaaggacactctggacttcagccaacaggactcctgcgctggactcctgagctgaagtgcacatgaccacattcaaggaagaaccttctgccacagctttgcaggatgaaaagctttcccacttggctcttattcttccacaagagctctctcaggaccaggttgttactcgttcagcaactctgcagaaaatgccctcccttgtggcttcctcagctcctgttcttggcctgaaaccccacagccttgatggcagcgcctcgtcttcaacttttgtgcttccttttacctaaattttcctgcctcccctgggtctgtattccccttgtgccacaaacacattgcattattcaatgtttctcaaacatggagttaaaaattatctggt

SEQ ID NO: 4 - DNA, 632 bp, Artificial Sequence
  WFDC10B
agagcccaagaacactggtggccaaaggatggtgtcttgtgaaaggagggcaagcaaaagtgtaggacaaattttgctttgggattttggttacacctgcagactatcccacagaaggaggaacagcactgaaatcctttctcgcaatcttcctgcattgtacacaggcagctctgcagggaagtctgtgactgcctggccagacttagggctcacgctctggtcagagttatggcaccccagactctgctgcttgtcctggttctctgtgtgctgctgctgcaggcccagggaggataccgtgacaagatgaggatgcagagaatcaaggtctgtgagaagcgacccagcatagatctatgcatccaccactgttcatatttccaaaagtgtgaaacaaataagatatgctgttcagccttctgtgggaacatttgtatgagcatcctatgagtgggagagtgggctgggatgtgcatcctgctccctgaacccttccatccgagactgtgcccacatccgaagcacaaggacatcaaatcatcagcacaagaacatcaacaggaatgccaccctccccagtgtctgaactccctgtccctgtcaaataaaccagaacaaatgcccatgga

SEQ ID NO: 5 - DNA, 1729 bp, Artificial Sequence
  EXOSC6
gcggaaggggttcgcacgccaagaaccgccatgcctggggatcaccgccgcatccgcggccctgaagaatcgcagccgccgcagctgtacgcggccgacgaggaggaggcgcccggcacccgcgacccaacgcggctacggcccgtgtacgcgcgcgccgggctgctgagccaggccaagggctcggcctacctggaggcgggaggcaccaaggtgctgtgtgccgtgtcgggcccgcgacaggccgagggcggcgagcgcggcggcggcccggccggagcaggcggcgaggccccggccgcgctgcgcggtcgcctgctctgcgacttccgccgcgcacccttcgcgggccgccggcgccgcgctcccccgggcggctgcgaggagcgtgagctggcgctggcgctgcaggaggcgctggagccggctgtgcgcctgggccgctacccgcgcgcgcagctcgaggtgtcggcgctgctgctggaggacggtggctcggccctggccgccgcgctcaccgccgccgcgctcgccctggccgacgcgggcgtggagatgtacgacctggtggtgggctgcggcctcagcctcgcgccggggcccgcgcccacctggctcctggaccccacgcggctcgaggaagagcgcgccgccgccggcctcaccgtggcgctcatgcctgtgctgaatcaggtggccgggctgctgggcagcggcgagggcggcctgacagagagctgggcggaggccgtacgcctgggcctcgagggctgccagcgcctctaccccgtgctgcagcagagcctggtgcgggccgcccgccgcaggggcgccgccgcccagccctgaaccagaagcctgagcaactacggacgcaagccgaggaccgtgctgccgccgtccacgaaaagacccgcgccatcggcctccagtttgcgtcgagaattcctggaagggccctgatatgactgtggttggactgacctgactgccagatggtgggacttggtctggagcagggactacttggaatgataaaggcaaaactcaacagcccctggagctgcgcttgtggtggagctggaccctgaaattacctggaccttttttttagagacagggtttctttctgcagtctcaaactcctagccttgattgatcctcctgccttggcctcccaaagtgctgggactacaggtgcatgcaaccacacctggctaattttcttttcttctttctttcttttttttttttttttttttttgatggagtcttgttctgttgcccaggctggagtgcaatggtgcaatcttggctcactgcaacctctgcctcctgggttcaatccattctcctgcctcagcctcccaagtagctgggattacaggcacatgcctccataccgggctaatttttgtatttttagtagagatggggtttcgccatgtgggccaggctgttctcgaatgcctgacctcaggtgatccacccgccttggcctcccaaagtgctggaattacaggtgtgagccactgtgcccagctgagtaaatttcttgattgcacagaatgtacggtgatattggcggacttaaggacatcgaattgtttatcaggaataaagtattatgtgtgttttctgcggccctggataatgctgtagcattcagggtcgattgagtaaaaaaaatgtagagatggaaaaaaaaaaaaaaaaaaaaaaaaaaaaa

SEQ ID NO: 6 - DNA, 4700 bp, Artificial Sequence
  ZNF804A
ggccgcgggtcccggcggcggggtgggcgggggaggcagcgggtgacagatgtactcctctgacagctctcagtatcagcccagtggctccctgccattggctcagtgcaatggaccggcaacgccgctcactataataacactcatgcctgccagcagcagcaactccgagtgcaggcgccgagcgcgggggatgctgccgccgccgccgcttctgctgccgcgcgggcggctcccgcagccccgctccgcccggccaccgcgcgggcactgactcccgctcggttccgtttcgccggcccggccccctcctaggctggaatcctcccgcggggctcgtcgtcccgacgcgaatctgaggagaaacaggagcgagagactgaggggagagcgcggcgagcatgcggaggcgggggagcctcggcgctcaccacagaggggtgcagtgagccagtctccagaggacgtgccgggggtggctgcgtgccctcgtggcgggttcccagcccaccgtcgccggccccggcgcgctgcggctgtgggcgcggggtgcgtggaagcggcggctgcggcggaggaggcggcggctgccccatggagtgttactacattgtcatcagctccacgcatctcagcaacggacactttcgcaacatcaagggagttttccggggccctctcagcaagaacgggaacaaaactctggactatgctgagaaggaaaataccatagcaaaagctctggaagatctgaaggcaaatttttactgtgaactctgtgacaagcagtactataagcaccaggagtttgacaatcacattaattcatatgaccatgctcacaagcagaggctcaaggaactgaaacaaagggaatttgctcgaaatgtagcatctaaatccaggaaagatgaaagaaaacaggaaaaggcactccaacgcctgcacaagctggctgagctaagaaaggaaactgtatgtgctcctggaagtggccccatgttcaaatcaacaactgttactgtgagagaaaactgtaatgaaatttcccaacgagttgttgtggattcagttaataaccagcaagatttcaaatatactttgattcatagtgaagagaatactaaagatgctaccactgttgctgaagatccagaaagtgcaaataattatacagcaaaaaataaccaagttggggatcaagcccaggggattcacagacacaaaatcggcttttcttttgcatttccaaagaaagcgtccgtgaagctagagtcctcagctgcagccttctctgaatacagtgatgatgcctcagtgggaaaaggatttagcagaaaaagtagatttgtccccagtgcttgtcatcttcaacaatcttcaccaacagatgtgcttttgagttctgaggagaaaactaactcttttcatccaccagaggcaatgtgcagagacaaagaaactgttcaaactcaagagataaaagaagtctctagtgaaaaagatgcattattattaccttcattttgcaagtttcaacttcagttatcttctgatgcagataattgtcaaaattcagtcccattagcagatcaaataccactagagagtgttgttattaatgaagacatacctgttagtggtaacagttttgagttgttaggaaataaatccacagttcttgacatgtctaatgattgcatatctgtgcaagctaccacagaggaaaatgttaagcataacgaggcatccacaactgaggttgaaaataaaaatggtcccgagacattggccccttcaaatactgaagaggttaacataactatacataagaaaacaaatttctgcaaaagacaatgtgagccatttgtacctgtccttaacaaacacagatctacagttcttcagtggccatcagaaatgctggtttatacaactacgaaaccatcaatttcctatagctgtaatcctctatgttttgacttcaagtctactaaagtaaataataatctagataaaaataagccagacttaaaagatctttgttctcagcagaagcaggaagacatttgcatgggaccactttcagattacaaggatgtatctacagaaggactcactgattatgaaattggaagtagcaaaaataaatgcagccaagtcactcctcttttggctgatgatattctctccagtagttgtgattctggaaaaaatgagaacacaggtcagaggtataaaaacatttcctgtaagatcagagaaacagaaaagtataattttactaaaagtcaaataaaacaggacactctagatgaaaaatacaacaaaataaggttgaaagagacccatgaatactggttccataaaagtagaagaaagaaaaaaagaaaaaagttatgtcagcatcatcatatggagaaaaccaaagaatcagaaactcgctgcaaaatggaagcagagaatagttacactgaaaatgctgggaaatatctattggaaccaatttcagaaaagcagtatttagctgcagagcaattattagactcacatcagttacttgataaaaggcccaaatcagaatccatatccttaagtgacaatgaagaaatgtgtaaaacatggaatactgaatacaacacttatgatactatcagttctaaaaaccactgtaaaaagaacacaatacttttaaatggacaatcaaatgcaacaatgatacattctgggaaacataatttaacatattctagaacttactgttgttggaaaaccaaaatgtcaagctgtagtcaggatcacagaagcttagttcttcaaaatgatatgaaacacatgagtcagaatcaggctgttaaaagaggttacaattctgtcatgaatgaatcagaaagattctatcgaaaacgtagacaacattcacattcttattcttcagatgaaagtttaaatcgacagaatcatttaccagaagaatttttgaggccaccaagtacttcagttgctccctgcaagcctaaaaagaaacggaggcgaaaaagaggcagattccaccccggatttgaaactttagaactcaaagaaaatacagattatcccgtgaaagacaattcttccttaaatcctctggataggttaataagtgaagacaaaaaagagaaaatgaaaccacaagaagttgcaaaaatcgaaaggaactcagaacaaacaaaccaattaagaaacaaactgtctttccaccctaacaatctccttccttctgaaaccaatggtgaaactgagcatttagaaatggagaccacttctggtgaattgtcagatgtttccaatgatcccaccacatctgtctgtgtagctagtgccccaacaaaagaagcaattgacaataccctgcttgaacacaaagaaagaagtgagaatataaatcttaatgaaaagcaaattccttttcaggtgcctaatattgaaaggaactttagacagtcacagcctaaatcctatctttgccattatgaactggctgaggcccttccacaaggaaagatgaatgagacaccaactgagtggctgcgttataattcaggaatccttaacacacaaccaccattaccattcaaagaagcacatgtcagtggtcatacttttgtaacagctgagcaaatcctggctccattagctttaccagagcaagcattattgatcccactagaaaaccatgacaaattcaaaaatgtaccatgtgaggtctaccagcacattctgcagccaaacatgctggccaacaaggttaaatttacctttcctccagctgccctcccaccccctagcacacctctgcagcctttgcctttgcagcagtccttatgttctacctctgtaaccactatccatcacactgttttgcagcagcacgctgcagctgctgcagctgcagctgcagccgcagctgcaggaacctttaaagtgcttcagccacaccaacagtttctttcccaaatcccagctctcaccagaacctcattacctcagctctcagtaggaccagtaggaccgaggctttgtcctgggaaccagccaacttttgttgctcctcctcagatgccaatcattccagcttccgttcttcatcctagccatctggctttcccatctttaccccatgcactctttccttcactgctttccccacaccctactgtcatccctttgcaacctctcttctagtcatcaccataatgggaaaaaaatactcttgtgaaaactattgctatatgcgttaagtgttcatctatgtgggtacatggctatttaactggtggaaataaactggccgatacatggcgtcattggtttgaaatcatttactgtaagtgcaatgatgcaaataaatccctaagtttctgatatataatattattaaagcactgaatagtttgaaaatcaatacaatatatgctatatattaaaatgatgtcttaagagtatgtataatgtacataaaatatatttatagtactctaatttatgttgtaaagtatgctcccttggtttttcttaatctttgtgtatttgcacctatttaatgtttagacaaagctgatggcactatgttttgtatcatgttccttgaaactgtaaattcagtgaaaaatatctcttgcaataaatttttgttaactatttaaaaaaaaaaaaaaaaa

SEQ ID NO: 7 - DNA, 2703 bp, Artificial Sequence
  PCIF1
gcagcgcggagtcccggcccgggacacaagatggcggcagcggcgctggggagggcgaggcggaggcggcaaaacgggcggtcgagcagaacgtgtagccgcgtcccctccagtccgctccgggcagctgctgatgcaaggaatcccctgggctcccgtccactccactgctgaccagcccattcgcctgtgctgagtcttcctgcaggcctttccttgcctctgtgggaccctgtgggggtccatccggctggagaagaaaagcctctcatgctaacgttgcagaccccagagggtcctgtgtgggtgtggagatggccaatgagaatcacggcagcccccgggaggaagcgtccctgctgagtcactccccaggtacctccaatcagagccagccctgttctccaaagccaatccgcctggttcaggacctcccagaggagctggtgcatgcaggctgggagaagtgctggagccggagggagaatcgtccctactacttcaaccgattcaccaaccagtccctgtgggagatgcccgtgctggggcagcacgatgtgatttcggaccctttggggctgaatgcgaccccactgccccaagactcaagcttggtggaaactcccccggctgagaacaagcccagaaagcggcagctctcggaagagcagccaagcggcaatggtgtgaagaagcccaagattgaaatcccagtgacacccacaggccagtcggtgcccagctcccccagtatcccaggaaccccaacgctgaagatgtggggtacgtcccctgaagataaacagcaggcagctctcctacgacccactgaggtctactgggacctggacatccagaccaatgctgtcatcaagcaccgggggccttcagaggtgctgcccccgcatcccgaagtggaactgctccgctctcagctcatcctgaagcttcggcagcactatcgggagctgtgccagcagcgagagggcattgagcctccacgggagtctttcaaccgctggatgctggagcgcaaggtggtagacaaaggatctgaccccctgttgcccagcaactgtgaaccagtcgtgtcaccttccatgtttcgtgaaatcatgaacgacattcctatcaggttatcccgaatcaagttccgggaggaagccaagcgcctgctctttaaatatgcggaggccgccaggcggctcatcgagtccaggagtgcatcccctgacagtaggaaggtggtcaaatggaatgtggaagacacctttagctggcttcggaaggaccactcagcctccaaggaggactacatggatcgcctggagcatctgcggaggcagtgtggcccccacgtctcggccgcagccaaggactccgtggaaggcatctgcagtaagatctaccacatctccctggagtacgtcaaacggatccgagagaagcaccttgccatcctcaaggaaaacaacatctcagaggaggtggaggcccctgaggtggagccccgcctagtgtactgctacccagtccggctggctgtgtctgcaccgcccatgcccagcgtggagatgcacatggagaacaacgtggtctgcatccggtataagggagagatggtcaaggtcagccgcaactacttcagcaagctgtggctcctttaccgctacagctgcattgatgactctgcctttgagaggttcctgccccgggtctggtgtcttctccgacggtaccagatgatgttcggcgtgggcctctacgaggggactggcctgcagggatcgctgcctgtgcatgtctttgaggccctccaccgactctttggcgtcagcttcgagtgcttcgcctcacccctcaactgctacttccgccagtactgttctgccttccccgacacagacggctactttggctcccgcgggccctgcctagactttgctccactgagtggttcatttgaggccaaccctcccttctgcgaggagctcatggatgccatggtctctcactttgagagactgcttgagagctcaccggagcccctgtccttcatcgtgttcatccctgagtggcgggaacccccaacaccagcgctcacccgcatggagcagagccgcttcaaacgccaccagttgatcctgcctgcctttgagcatgagtaccgcagtggctcccagcacatctgcaagaaggaggaaatgcactacaaggccgtccacaacacggctgtgctcttcctacagaacgaccctggctttgccaagtgggcgccgacgcctgaacggctgcaggagctgagtgctgcctaccggcagtcaggccgcagccacagctctggttcttcctcatcgtcctcctcggaggccaaggaccgggactcgggccgtgagcagggtcctagccgcgagcctcaccccacttaacatatcctgcggggaggaggagccccaggggtgctagtctggactgctgggactcgggcccctggggcctcagagggaccccggctgccactgacatatgaagattatggttctgccagggctcccctccctgcctgtccccaagtcctcacctcaaactccctccaagtcccatgtatataggtcctgatgccttcccaaccccgcccctcaccctgttgccaccttgtttcatttgtaaaaggaaatacagaaacccccccaagaaaaaaaa

SEQ ID NO: 8 - DNA, 1123 bp, Artificial Sequence
  TCEAL2
agcggtcgggtccgggcgcccgcgcagaatcagctgtctgagctgcccaggcggcgggggagcagcgagcgggcttcagcgagccgcaggaggcacaggcctgtcctgggtccccgcaggtctgcgcgtctgttgttcccagcgctctgagaggcctgaaaaggaagagcaacctgtccagaatccccgcaggaaaggaaaaggaggggaaatctcgacatggaaaaactcttcaatgaaaatgaaggaatgccttcgaatcaaggaaagatagacaatgaagaacagccaccgcacgagggaaagccagaagtagcttgtattctggaagacaagaagttagaaaacgagggaaacacagaaaacacgggcaagagagttgaggaaccgttaaaggataaagaaaagccagagagtgcgggaaaggcaaaaggagaaggaaagtcagagaggaagggaaagtcagagatgcagggaggatcaaagacagagggaaagccagagagagggggaagggcagagggtgaaggagagccagacagtgaaagagagccagagagtgagggagagccagaaagtgaaacaagggctgcaggaaagcgcccagctgaggatgatatacccaggaaagccaaaagaaaaaccaacaaggggctggctcagtacctcaagcaatataaggaagccatacatgatatgaatttcagcaatgaggacatgataagagaatttgacaacatggctagggtggaggataaaaggagaaaaagcaaacagaaattgggggcgtttttgtggatgcaaagaaatttacaggaccccttctatcctaggggtccaagggaattcaggggtggctgcagggccccacgaagggacactgaagacattccttatgtgtagtgtccctggcaggcatttgtcaggccatatgttttaaccttatggtaatactttgctttagtcgttcctcctgctaccagtagcgttttgacccacctgccagtgtttgcttgctctatgtttcagtagcagattttcacacatgtgcattgcagagacgtcatgattcgtggaaaaataaagcagcttataatatcaaaaaaaaaaaaaaaaaaaaaaa

SEQ ID NO: 9 - DNA, 3331 bp, Artificial Sequence
  MS4A1
gtctatcagcgatttcatcttcaggcctggactacaccactcaccctcccagtgtgcttgagaaacaaactgcacccactgaactccgcagctagcatccaaatcagcccttgagatttgaggccttggagactcaggagttttgagagcaaaatgacaacacccagaaattcagtaaatgggactttcccggcagagccaatgaaaggccctattgctatgcaatctggtccaaaaccactcttcaggaggatgtcttcactggtgggccccacgcaaagcttcttcatgagggaatctaagactttgggggctgtccagattatgaatgggctcttccacattgccctggggggtcttctgatgatcccagcagggatctatgcacccatctgtgtgactgtgtggtaccctctctggggaggcattatgtatattatttccggatcactcctggcagcaacggagaaaaactccaggaagtgtttggtcaaaggaaaaatgataatgaattcattgagcctctttgctgccatttctggaatgattctttcaatcatggacatacttaatattaaaatttcccattttttaaaaatggagagtctgaattttattagagctcacacaccatatattaacatatacaactgtgaaccagctaatccctctgagaaaaactccccatctacccaatactgttacagcatacaatctctgttcttgggcattttgtcagtgatgctgatctttgccttcttccaggaacttgtaatagctggcatcgttgagaatgaatggaaaagaacgtgctccagacccaaatctaacatagttctcctgtcagcagaagaaaaaaaagaacagactattgaaataaaagaagaagtggttgggctaactgaaacatcttcccaaccaaagaatgaagaagacattgaaattattccaatccaagaagaggaagaagaagaaacagagacgaactttccagaacctccccaagatcaggaatcctcaccaatagaaaatgacagctctccttaagtgatttcttctgttttctgtttccttttttaaacattagtgttcatagcttccaagagacatgctgactttcatttcttgaggtactctgcacatacgcaccacatctctatctggcctttgcatggagtgaccatagctccttctctcttacattgaatgtagagaatgtagccattgtagcagcttgtgttgtcacgcttcttcttttgagcaactttcttacactgaagaaaggcagaatgagtgcttcagaatgtgatttcctactaacctgttccttggataggctttttagtatagtatttttttttgtcattttctccatcaacaaccagggagactgcacctgatggaaaagatatatgactgcttcatgacattcctaaactatcttttttttattccacatctacgtttttggtggagtcccttttgcatcattgttttaaggatgataaaaaaaaataacaactagggacaatacagaacccattccatttatctttctacagggctgacattgtggcacattcttagagttaccacaccccatgagggaagctctaaatagccaacacccatctgttttttgtaaaaacagcatagcttatacatggacatgtctctgccttaacttttcctaactcccactctaggctattgtttgcatgtctacctacttttagccattatgcgagaaaagaaaaaaatgaccatagaaaatgccaccatgaggtgcccaaatttcaaataataattaacatttagttatatttataatttccagatgacaaagtatttcatcaaataacttcatttgatgttccatgatcaagaaagaatccctatctctattttacaagtaattcaaagaggccaaataacttgtaaacaagaaaaggtaacttgtcaacagtcataactagtaattatgagagccttgtttcataaccaggtcttcttactcaaatcctgtgatgtttgaaataaccaaattgtctctccaatgtctgcataaactgtgagagccaagtcaacagcttttatcaagaatttactctctgaccagcaataaacaagcactgagagacacagagagccagattcagattttacccatggggataaaaagactcagactttcaccacatttggaaaactacttgcatcataaatatataataactggtagtttatatgaagcagacactaagtgctatagacactctcagaatatcatacttggaaacaatgtaattaaaatgccgaatctgagtcaacagctgccctacttttcaattcagatatactagtaccttacctagaaataatgttaacctagggtgaagtcactataatctgtagtctattatttgggcatttgctacatgatgagtgctgccagattgtggcaggtaaagagacaatgtaatttgcactccctatgatatttctacatttttagcgaccactagtggaagacattccccaaaattagaaaaaaaggagatagaagatttctgtctatgtaaagttctcaaaatttgttctaaattaataaaactatctttgtgttcttttctgcaacagatgattccaacatgggtgtttgtctattcttctttactcttgaaacattagaccatgggaggctcttacagccttgagttgatatttatacaacccaaatctaggtttgaacggtgaggtgtcaggtcatcaaatattcatgtctatatagtcttacacaggttctcaaaaaaaatgttcatgggataggtcattgataatggattccttattctgagaactccagacgactgaaatatatgagagaaggaaaaggacatagtaggagcaggcctgagaaaaaaatgaaagtcagaaatctttaaaaaaatacaagatcttatttctatcttattttttctcctcttctgaaatatatatgaggattcctctccaaacccatggtttctctaagaattttgagtcatttgtatgacctcaaataattagttttagctgacctcacataactccttataataggagacatctttaatgtctgctattaaagaaggatgaaaattcctatgaccttctccccgattatccctttggcaatatagagtcaaataataacattgaccaatagtaaacatgctttgccaagaagtagaagatatattctctagccttagtttttcctcccaatttgcatttttgtaaaaataatgttgtatccacaaaggaaataaactttaaaaacccaagtgca

SEQ ID NO: 10 - DNA, 2076 bp, Artificial Sequence
  HOXA9
agttgttacatgaaatctgcagtttcataatttccgtgggtcgggccgggcgggccaggcgctgggcacggtgatggccaccactggggccctgggcaactactacgtggactcgttcctgctgggcgccgacgccgcggatgagctgagcgttggccgctatgcgccggggaccctgggccagcctccccggcaggcggcgacgctggccgagcaccccgacttcagcccgtgcagcttccagtccaaggcgacggtgtttggcgcctcgtggaacccagtgcacgcggcgggcgccaacgctgtacccgctgcggtgtaccaccaccatcaccaccacccctacgtgcacccccaggcgcccgtggcggcggcggcgccggacggcaggtacatgcgctcctggctggagcccacgcccggtgcgctctccttcgcgggcttgccctccagccggccttatggcattaaacctgaaccgctgtcggccagaaggggtgactgtcccacgcttgacactcacactttgtccctgactgactatgcttgtggttctcctccagttgatagagaaaaacaacccagcgaaggcgccttctctgaaaacaatgctgagaatgagagcggcggagacaagccccccatcgatcccaataacccagcagccaactggcttcatgcgcgctccactcggaaaaagcggtgcccctatacaaaacaccagaccctggaactggagaaagagtttctgttcaacatgtacctcaccagggaccgcaggtacgaggtggctcgactgctcaacctcaccgagaggcaggtcaagatctggttccagaaccgcaggatgaaaatgaagaaaatcaacaaagaccgagcaaaagacgagtgatgccatttgggcttatttagaaaaaagggtaagctagagagaaaaagaaagaactgtccgtcccccttccgccttctcccttctctcacccccaccctagcctccaccatccccgcacaaagcggctctaaacctcaggccacatcttttccaaggcaaaccctgttcaggctggctcgtaggcctgccgctttgatggaggaggtattgtaagctttccattttctataagaaaaaggaaaagttgaggggggggcattagtgctgatagctgtgtgtgttagcttgtatatatatttttaaaaatctacctgttcctgacttaaaacaaaaggaaagaaactacctttttataatgcacaactgttgatggtaggctgtatagtttttagtctgtgtagttaatttaatttgcagtttgtgcggcagattgctctgccaagatacttgaacactgtgttttattgtggtaattatgttttgtgattcaaacttctgtgtactgggtgatgcacccattgtgattgtggaagatagaattcaatttgaactcaggttgtttatgaggggaaaaaaacagttgcatagagtatagctctgtagtggaatatgtcttctgtataactaggctgttaacctatgattgtaaagtagctgtaagaatttcccagtgaaataaaaaaaaattttaagtgttctcggggatgcatagattcatcattttctccaccttaaaaatgcgggcatttaagtctgtccattatctatatagtcctgtcttgtctattgtatatataatctatatgattaaagaaaatatgcataatcagacaagcttgaatattgtttttgcaccagacgaacagtgaggaaattcggagctatacatatgtgcagaaggttactacctagggtttatgcttaattttaattggaggaaatgaatgctgattgtaacggagttaattttattgataataaattatacactatgaaaccgccattgggctactgtagatttgtatccttgatgaatctggggtttccatcagactgaacttacactgtatattttgcaatagttacctcaaggcctactgaccaaattgttgtgttgagatgatatttaactttttgccaaataaaatatattgattcttttctaaaaaaaaaaaaaaaaaaaa

SEQ ID NO: 11 - DNA, 3520 bp, Artificial Sequence
  TMEM132A
attcgctccctcccaccccactgctcccgctccattgtctgggaattgcagccgcggggcgggcggcggcggcggcggcggcggccgggacccagcgggccaggtggggacggcgcggagcgggtgcgggagatgccgtgcgggactggggccacctgagccgcccgcctcgtccccgccttctgtgggaaggatgtgcgcgcggatggccggtcgcacaacagcggcccctcgggggccctacggcccctggctctgcctcctggtggccctcgccctggacgtcgtgagagtggactgtggccaggctcccctggaccctgtctacctgccggcagccctggagctcctagacgcccctgaacacttccgtgtgcagcaggtgggccactacccacctgccaactcctctctgagctcccgatctgagacctttctgctcctacagccctggcccagggcccagccacttctccgggcctcctacccaccttttgccactcagcaggtggtcccccctcgagtcactgagccccaccaacggccagtcccatgggacgtgcgggccgtttcagtggaagcggctgtgactccagcagagccctacgcccgggttctcttccacctcaaagggcaggattggccaccagggtctggcagcctgccctgtgcccggctccatgccacacaccctgccggcactgctcaccaagcctgccgcttccagccatccctgggcgcctgcgtggtggagctggagcttccctcgcactggttctcacaggcctccaccacacgggccgagctggcctacacgcttgagcctgcagctgagggccctgggggctgtggctccggcgaggagaacgaccctggggagcaggccctcccagtggggggtgtggagctgcgcccagcagaccccccgcagtaccaggaggtacctctggacgaggctgtgactctgcgggtgcctgacatgccagtgcggcccggccagctctttagtgctaccctcctgcttcggcacaacttcacagccagcctcctgaccctgcggatcaaggtgaagaaggggctgcatgtgacagccgcccgcccagcccagcccacactctggactgccaagctggaccgcttcaagggctccaggcaccacaccaccctcatcacctgccaccgtgctgggctcacagagccagattccagcagtccccttgaactgtctgagttcctatgggtggactttgtggtggagaatagcactggtgggggcgtagcggtcactcgccccgtcacgtggcagctggagtacccaggccaggcccctgaagcagagaaggacaaaatggtgtgggaaatcctggtgtctgagcgggacatcagagcccttatcccactggccaaggctgaggagctggtgaatacagcaccactgactggagtgccccagcatgtccccgtgcgccttgtcactgtggacggcgggggggccttggtggaggtgacagagcatgtcggctgcgagtctgccaacacacaggtcctgcaggtgtctgaggcctgtgatgccgtgttcgtggctggcaaggagagccggggcgcccggggggtgcgagtggacttctggtggcgccggctccgcgcctcgctgcggctgaccgtgtgggcccccctgctaccgctgcgtatcgagctcaccgacaccaccctcgagcaggtccgcggctggagggtacctggccctgctgaagggcctgcggaacccgctgcagaggcgtcggatgaggccgagcggcgcgcccgtggctgccacctgcagtaccagcgggccggtgtgcgcttcctcgcccccttcgcggcccacccgctggacggcggccgccgcctcacgcacctgcttggccccgactggctgctagacgtgtcccacctcgtggcgccacacgcccgcgtgctggactcgcgtgtagcctctctggagggtggccgtgtcgtggtgggccgggagcccggtgtcacctccattgaggtgcgttccccactgtctgactccatcctgggggagcaggcgctggctgtgacggacgacaaggtctcagtgctggagctgagggtgcagccagtgatgggcatctcgctgaccttgagccggggcactgcccaccccggggaggtcacagctacgtgctgggcacagtcagcccttcccgccccaaagcaggaggtggccctctccctatggctgtccttctctgatcacactgtggccccagctgagctctacgaccgccgtgacctgggactgtccgtctcagccgaggagcctggtgccatcctgccagctgaggagcagggtgcccagctcggggtggtggtgagtggggcaggcgccgaggggctgccgctgcatgtggctctgcacccgcccgagccctgccgccggggccgccaccgtgtgcctctggcctctggcaccgcctggctggggctgccccctgcctccactccagcccctgctctcccatccagccctgcttggagcccaccagccacagaagccaccatgggtggtaaacggcaggtggcaggcagtgtcgggggcaacacaggtgtgaggggcaagtttgagcgggcagaggaggaggccaggaaggaggagaccgaagccagggaggaggaggaggaagaggaggaggagatggtccctgcccctcagcatgtcactgagctagagctgggcatgtacgccctgctgggagtcttctgcgtggccatcttcatcttcttggtcaatggtgtggtcttcgtcctgcgctatcagcgcaaagaacctcccgacagtgccactgaccccacctccccccagccccacaactgggtctggctgggcactgaccaggaggaactgagccgccagctggaccggcagtcccctggcccgcccaagggggaggggagctgcccctgtgagagtgggggaggaggggaggcccctaccctggcccctggccctcctgggggcaccaccagctcctcaagcaccctggcccgaaaggaggctggggggcggcggaagcgagtagagtttgtgacatttgcgccagcccctccagcccagtcacctgaggagcctgtaggggcccctgctgtgcagtccatccttgtggcaggcgaggaggacatccgctgggtgtgtgaggacatggggctgaaggaccctgaggagcttcgcaactacatggagaggatccggggcagctcctgaccctccacagccacctggtcagccaccagctggggcaacgagggtggaggtcccactgagcctctcgcctgcccccgccactcgtctggtgcttgttgatccaagtcccctgcctggtcccccacaaggactcccatccaggccccctctgccctgccccttgtcatggaccatggtcgtgaggaagggctcatgccccttatttatgggaaccatttcattctaacagaataaaccgagaaggaaaccaga

SEQ ID NO: 12 - DNA, 3218 bp, Artificial Sequence
  ZNF750
acttaaatccctcccactggaacagcaggctccagtttcacccagcaagcgtgagaacaggtactgcttcctgagcaccgccagccaccggcaccaagaccggccacatcccagcactgcccacctctgctcccagccgccagatgacggaggctctcgccagaccctcagcacgcagagctggcttctgatagaagtgatcgggaaagaaagcaaagcgggaggtgcctctttagaaaccacgaagtgcacgcggcgtcgacagtgatcacgccacctggacagccagagtccaaggcataaggaggaaaatgagtctcctcaaagagcggaagccaaaaaagccacattacatccccaggcctccaggaaagcccttcaagtataaatgtttccaatgtccctttacttgcaatgagaagtcacatctttttaatcacatgaagtatggtctttgtaaaaactcgattactttagtatcagagcaggatcgagttcccaagtgccctaaatctaactcactagaccccaagcaaaccaaccagcccgatgccacggcgaagccagcctcttccaagtctgtcgcaaatggactctctgccttcgactcgaagcttcagcacagctctgccagggaagacatcaaggaaaacctggagctgcaagcccggggaacccacaggtgcctgggacagaagccagccctccacagggcatcaccctgcaagagcccagctccggaagccgccctcggtgcccagcctgctctggaaggcgcagctcggccttctgcatttgttccagtcggcgagcacagactcaaggggccagacaacgccgaggcgcccgagacactggctttacacaaccccactgccaaggccgtgtctttccacaccaagtcggccttccacactcctggctacccctggaaagccggctcacctttccttccaccagagtttccacataaaatctcatctacaaaggggcttggggccatttccccttacatgcaccccacaatcccagagtacccgcctcacttttacacagagcacgggctggccaccatctactcgccttacctgctggctgggagctcgcctgagtgtgacgcacccctgctgtcagtctacggaacccaagacccgagacacttcctgcctcacccggggccgatccctaagcacctggctccatctccagccacatacgatcactacaggtttttccagcaatatccctctaacctgccgattccttacggattttacaggccagagtctgcattttcctcctatggtctcagactcccacctgtcactggcctcacccgagatcagagctctcacctgcttgaagaagccaccctggtctatccagcctcgagtccttccaggttaaacccttcggaccccaacagaaaacacgtcgagttcgaaagtccaattcctgaggctaaagactcctccaaggctgggcagagagacacggaagggtccaaaatgagcccccgcgcagggagtgcagccacgggctccccagggaggccgagccccaccgacttcatgcagacgagccagacctgcgaaggcctgtacgacctctccaacaaggcagcctccagcgcactgggaagactctacccgccagagcaaagcctcacagccttcaggcctgttaagaaaagcacagaatgcctacctgcccaggctgctgagaccacagcagagtctccagtaagcctcaatgttgtgaacggagaccctcctgctccgaccggaagcgcctctctcgtctcggaggccgcgccttccagtccggacgacagctccgggatgggccccctcaacctctccaagaaatcagagataaacctggcagccacccacgaacccacgtaccaaggcagcccccaggcggaaaccgccagcttctcagagctgcaggaccttccactcaatctctcggtgaaggacccctgtaacacccaggctccgaggcctgccttccccggtcgaccacgagctgcagaacctgctgctgctgttccacagaagactgggacagaaggttctgaggatgggcccagccaccctgagaccaagccaggcagcctcgacggtgacggggccccacccacaggccccggcgaggaggctccagacgcatgcgcggtggacagcagcgaggagcagaagcagacggcagccgtggccctgtgccagctggcggcctacagccccaggaacatccgggtgggcgatggggatgctgcggccccggaacctgcctgccggcaagacacacccacactgagctccatggagagccaagaggcccagtgtgacctcagacccaaaggacaaaagaggacaagtctaagggatgctggaaaatcccagcaaggagctaagaaggcgaagctgcaggacacggccagagtgttcacactacgaaggagggcccgggtgtcctaacgccgggttcacacgtgtgttcacagagctacggccacacacacgccttccaaggtggcaagctacaacacctctgaactggcactttcacatttttacaaatgcagctgctgcttctcaaaaaaacaaacaaacaaacaaacaaaaaaccctccaattcagtttttataaatattaagcatgaatattaaaaggtgcttctacttttggttgtaaaaacacctgaatgactctaagactgatatgtattttcaagtctaagctgtcttacagaagatcttttataaatgtttccttataaatatctcaccattacaacaaattgttttaactgtttttctattagctctagctgcatatttgatgtaaatgacaattactgaaaaaatgtcagaaaaaacattttcagtactaacattaaagtgccatatgtaaaaaagaaaaatgtgatttgtataactaaataacacacaaacatcaagaggctatttatacaaataatttatttccactagggaaagtgcattactggtgaaggtattatcaatttattctacttgcttataatgttacagtgaatgttctggcttactctgcctcactttccattccccaaaatgatgtgtatgttgctaattttccaataaactcatatgaaccataaggaaacataaaatgcaaataaacataaatctatgttatcctttaaaaaaaaaaaaaaaaaaaaaaaaaaaa

SEQ ID NO: 13 - DNA, 1052 bp, Artificial Sequence
  MYL1
actctgggtccatcttcaagacactgggctgtggatcaacccaaccaccactcctcttccaagaatcattttgacaggttcttttggaggaactccttctctttttaacccacccttttaaaaaaaaaaatggcaccaaagaaagacgtgaagaaacctgtggctgcggctgcggctgccccagccccggcaccggcacctgcacctgcccctgccccagccaaacccaaagaagaaaaaattgacctctctgccattaagatcgagttctctaaggaacagcaggatgaattcaaggaggcatttctcctgtttgacagaacaggtgattccaagatcaccttaagccaggtcggtgatgtccttcgagctctgggcacaaatcccaccaatgcagaggtcaggaaagttctgggaaaccccagcaatgaagagctgaatgccaagaaaattgagtttgaacaatttctgcctatgatgcaagccatttccaacaacaaggaccaggccacctatgaagactttgttgagggtctgcgtgtctttgacaaggaaggcaatggcacagtcatgggtgctgaactccgccatgttctagccaccctgggtgaaaagatgaaagaggaagaagtggaagccctgatggcaggtcaagaagactccaatggctgcatcaactacgaagcttttgtcaagcacatcatgtctatctgaatggagctctcaagaacaagcattgtttaggaagactggctggaaacttattttaatcacacccatgacaaactctccagatctgtttaccatcattcaggaaaacaaagcaatctggacggttcaagactgagcaactccctgaatttttatacatcttcagtttttctctgaattgaattcataccacacaaacaaagtgtctgctgctctagatgagaagaataaaatattgacaatctcaaatccaagcaccattctttattatctaccatgaatcaacaaacattcttaaaacaataaatcaataaacaattttggtcagtctggaatgttca

SEQ ID NO: 14 - DNA, 3465 bp, Artificial Sequence
  GPR88
gcacagggtgctctcctcttgagctcagcttctgcttttgcagccaagcattcttgctgctgctgcctgcctgcccacccgcctgggcttgcagcccgccactttactttctccagccctgataccagctgagaagtctccctgcagctgctagttcctgcccaggaccatgtgtgtggatgctgcttgggagaagcgggcacttgctcctggcactgatcccagctgagtttctcctgttgatttctggaccactgatgctgttgctgaggaggtatttcccggcatccctccccctgagacaccggctaaggaccagcctaaacgcaaggcaggacagtgtcaggatggaccgcgctgccagaagccgacgctagcgagggaggtgtgaagagttggccagaatgaccaactcctcctccacatccacctcctccaccaccggtggctcgctgctgctgctctgcgaggaagaggagtcgtgggcgggccggcgcatcccggtgtcactcctgtattcgggcctggccatcgggggcacgctggccaacggcatggtcatctatctcgtgtcgtccttccgaaagctgcagaccaccagcaacgccttcatcgtgaacggctgcgccgccgacctcagcgtctgcgccctctggatgccgcaggaggcggtgctcgggctcctgcccaccggctctgcggagccccccgcagactgggacggcgctgggggcagctaccgcctgctacggggtgggctgctgggcctcggactcacggtgtccctcctctcccactgcctcgtggccctgaaccgctacctgctcatcacccgggcgcccgccacctaccaggcgctgtaccagaggcgccacacggcgggcatgctggcgctgtcctgggcgctcgccctgggcctcgtgctgctgctcccgccctgggcaccgcggcccggcgccgcgccaccgcgagtccactacccggcgctgctggccgccgcggcgctgctggcgcagacagctctgctgctgcactgctacctgggcatcgtgcgccgcgtgcgtgtcagcgtcaagcgggtcagcgtgctcaacttccacctgctgcaccagttgcccggctgcgccgccgccgccgccgccttcccgggcgcccagcacgcgccgggccccggtggcgccgcgcacccggcgcaggcccagcccctgccgcccgcgctgcacccgcggcgggcacagcggcgtctcagcggcctgtcggtgctgctgctctgctgcgtcttcctgctggccacgcagccactggtgtgggtgagcctggccagcggcttctcgctgccggtgccctggggagtgcaggcggccagctggctcctgtgctgcgccctgtccgcgctcaatccgctgctctacacgtggaggaacgaggagttccgccgctccgtgcgctcagtcctgccgggcgtcggcgacgcggcggccgctgccgttgccgccacagccgtgcccgcagtgtcccaggcgcaactgggcacccgcgccgcgggccagcactggtaacctagccggggcccgagggaagcggagatccccggcttccgacgtccttgggcaccgtcgcctccttccctcctagggcatcccctgcctgaacgaagacttccgccgcgaagcccgatagatcgggggaaaatggggccttcgaccccagcgggctacctgaaccaaggcgtctctttaagtggggcgcccgaagtcattttggacggccacctgatttttaccctttgtttctgtgttttagaggaatcctaaagtcaaaacaccagagacttgaagaacttgcaaactggcgttttaaaataaccggttaatttatttccacacagtttgtttttgaaaaagagctttcataatgtataaccctttccactttcatcgtcttatatatgaagcgccttgagtgtgcatgaaccaaaggaaataacattgaagaaggaaaacaatatgtagaaagtattttagaaagtaacctgtctttgatgatgcttctcttaccatttagtttttgtatattaccctggggcagtgaagccctaggtgtgcccaccagtatgagttgccattaagacctcaagccctttattcttaaaagggtttttaataaagtctttctcaaatgaggtagaatcttagccagtgagaaaaaaaattattttatgctccttttttttcgcactcttaagactgaaaattggcgttgagtgttatagtgaaaattttccagtttgataattgatggtcagagccagcactggaattttgaaaacaaataaggtgattatctattttaggtaccgtttcacattttctatagcatgcacacttgttgctaccctcattttgtaaccaatttatttgccttatgaatgtgattgcagctttgaacattctgtactataatggttgctaagaagaataagtccttctgttttctctttaacatttaaaatatctcaatgcacatgatataattaaacactaataataccatgactgcatagctaatattagctgctattgcatgctcctagatgctagaacttattgggcatgtggtatactgaagcaatacccgttagacaaggatattttacttcttccagacaccagaagaaatggccttcaattatttgaaaagagacacagagacacctctggctacctagagttcttcctgtcttgacccaatttatgagaaagctcccagttgggactttatctcacaagtggaatcacagtcaagacggatcaataatatggtttggctcagcaaagccagctgtgctcttttagggtttaaacaagccacacgttagaaagcaacactgtttttatgtagttcatatatattaccatgacatttaacatcaatatcgtatatgttgaaggaggtataataaactcagtcatatatagtgaacagttcaaatgggaaagtgttctaaaacatattatttgagatttgtcatattcatctttggtttactaaatttacttagaaatatttgaaatgcaaaattgtgtgaaatcaccttatcaaattaaaatgggaagaaagtaattttaataatttttaataatcatatgtcagcattctgactacttaccacatcaaatctgggcccaaacagcctcagttaactgcataattcaggaacaaaaccagcttgctttgttgcacgcctgggcaatttcagccaggacattaggaccacttgttgtacatctgaataattatggaagttgggacatgttaaggaaaacaaatatgttcatcaccaacaatcagctgtcattttattaatctatcccttttgtgcatgcaccatttctctcttactaacagtttcatctgttcacattttccttgattcaaatattaaagttcagacaactattctga

SEQ ID NO: 15 - DNA, 3272 bp, Artificial Sequence
  DNER
aaccgcggatcccgcagctgcaggaggcgcccggcccggcggagcagccctagccgccaccgtcgctctcgcagctctcgtcgccactgccaccgccgccgccgtcactgcgtcctggctccggctcccgcgccctcccggccggccatgcagccccgccgcgcccaggcgcccggtgcgcagctgctgcccgcgctggccctgctgctgctgctgctcggagcggggccccgaggcagctccctggccaacccggtgcccgccgcgcccctgtctgcgcccgggccgtgcgccgcgcagccctgccggaatgggggtgtgtgcacctcgcgccctgagccggacccgcagcacccggcccccgccggcgagcctggctacagctgcacctgccccgccgggatctccggcgccaactgccagcttgttgcagatccttgtgccagcaacccttgtcaccatggcaactgcagcagcagcagcagcagcagcagcgatggctacctctgcatttgcaatgaaggctatgaaggtcccaactgtgaacaggcacttcccagtctcccagccactggctggaccgaatccatggcaccccgacagcttcagcctgttcctgctactcaggagcctgacaaaatcctgcctcgctctcaggcaacggtgacactgcctacctggcagccgaaaacagggcagaaagttgtagaaatgaaatgggatcaagtggaggtgatcccagatattgcctgtgggaatgccagttctaacagctctgcgggtggccgcctggtatcctttgaagtgccacagaacacctcagtcaagattcggcaagatgccactgcctcactgattttgctctggaaggtcacggccacaggattccaacagtgctccctcatagatggacgaagtgtgaccccccttcaggcttcagggggactggtcctcctggaggagatgctcgccttggggaataatcactttattggttttgtgaatgattctgtgactaagtctattgtggctttgcgcttaactctggtggtgaaggtcagcacctgtgtgccgggggagagtcacgcaaatgacttggagtgttcaggaaaaggaaaatgcaccacgaagccgtcagaggcaactttttcctgtacctgtgaggagcagtacgtgggtactttctgtgaagaatacgatgcttgccagaggaaaccttgccaaaacaacgcgagctgtattgatgcaaatgaaaagcaagatgggagcaatttcacctgtgtttgccttcctggttatactggagagctttgccagtccaagattgattactgcatcctagacccatgcagaaatggagcaacatgcatttccagtctcagtggattcacctgccagtgtccagaaggatacttcggatctgcttgtgaagaaaaggtggacccctgcgcctcgtctccgtgccagaacaacggcacctgctatgtggacggggtacactttacctgcaactgcagcccgggcttcacagggccgacctgtgcccagcttattgacttctgtgccctcagcccctgtgctcatggcacgtgccgcagcgtgggcaccagctacaaatgcctctgtgatccaggttaccatggcctctactgtgaggaggaatataatgagtgcctctccgctccatgcctgaatgcagccacctgcagggacctcgttaatggctatgagtgtgtgtgcctggcagaatacaaaggaacacactgtgaattgtacaaggatccctgcgctaacgtcagctgtctgaacggagccacctgtgacagcgacggcctgaatggcacgtgcatctgtgcacccgggtttacaggtgaagagtgcgacattgacataaatgaatgtgacagtaacccctgccaccatggtgggagctgcctggaccagcccaatggttataactgccactgcccgcatggttgggtgggagcaaactgtgagatccacctccaatggaagtccgggcacatggcggagagcctcaccaacatgccacggcactccctctacatcatcattggagccctctgcgtggccttcatccttatgctgatcatcctgatcgtggggatttgccgcatcagccgcattgaataccagggttcttccaggccagcctatgaggagttctacaactgccgcagcatcgacagcgagttcagcaatgccattgcatccatccggcatgccaggtttggaaagaaatcccggcctgcaatgtatgatgtgagccccatcgcctatgaagattacagtcctgatgacaaacccttggtcacactgattaaaactaaagatttgtaatctttttttggattatttttcaaaaagatgagatactacactcatttaaatatttttaagaaaataaaaagcttaagaaatttaaaatgctagctgctcaagagttttcagtagaatatttaagaactaattttctgcagcttttagtttggaaaaaatattttaaaaacaaaatttgtgaaacctatagacgatgttttaatgtaccttcagctctctaaactgtgtgcttctactagtgtgtgctcttttcactgtagacactatcacgagacccagattaatttctgtggttgttacagaataagtctaatcaaggagaagtttctgtttgacgtttgagtgccggctttctgagtagagttaggaaaaccacgtaacgtagcatatgatgtataatagagtatacccgttacttaaaaagaagtctgaaatgttcgttttgtggaaaagaaactagttaaatttactattcctaacccgaatgaaattagcctttgccttattctgtgcatgggtaagtaacttatttctgcactgttttgttgaactttgtggaaacattctttcgagtttgtttttgtcattttcgtaacagtcgtcgaactaggcctcaaaaacatacgtaacgaaaaggcctagcgaggcaaattctgattgatttgaatctatatttttctttaaaaagtcaagggttctatattgtgagtaaattaaatttacatttgagttgtttgttgctaagaggtagtaaatgtaagagagtactggttccttcagtagtgagtatttctcatagtgcagctttatttatctccaggatgtttttgtggctgtatttgattgatatgtgcttcttctgattcttgctaatttccaaccatattgaataaatgtgatcaagtcaagga

SEQ ID NO: 16 - DNA, 10718 bp, Artificial Sequence
  FRY
agggggcggcgctcccggcccatcccttagccccgcggcggccgtgtgggccggaggctgcctgcaccgcgtcagggaggccggcctagaaaccctccctcccagaagaaagccgatcccagttcaggtggggtcttcctcggttgcgtacctggctggagccgagctggtgggcggccggcagccggcgtttctggtgatgacagccccgaaatgaaagcagcgcggccgccgcctccgagggctgcagggagatcagcgtccagcaaataagaagcaagtcctggacccggaggaggaggagcggccgagcatctctctctgctccgccgtgtcctttagatgagcactcccggccggagccggaggtggatccgcagagctgcctctgggcgcctgaccccgcgctgacatcacaacctgtgacaggcgcatcacgcccggtacctgctcccggccgctgcccgtcctcccagcctctttgtatgccgcagacatggccagccagcaggattcgggcttctttgagatcagtatcaaatatttactgaaatcctggagtaatacttctcccgttggcaacggttacatcaagcctccggttccacctgcttctggcacgcacagggagaaagggccgccaaccatgctacccatcaatgtggacccagacagtaaaccaggagaatatgtcctcaaaagtttatttgtcaacttcaccactcaggctgaacgcaagattcgtatcattatggcagagcccctggaaaagccattgacaaaatctctgcaacgtggagaagacccccaatttgatcaggtcatcagctcaatgagctccctttctgagtactgcctgccttccattctacgtacattatttgactggtataaaaggcaaaatggcattgaggatgaatcacatgaatacagaccaagaacaagcaataaatcaaaaagcgatgaacaacagcgagattatttaatggaaagacgggacctcgccattgattttattttttctttagtattaatagaagttttgaaacagattccacttcatcctgtaatagacagtttaatacatgatgttattaacttggctttcaagcactttaaatacaaagaagggtaccttggtcccaacactggcaatatgcatattgtggcagacctgtatgcagaagtcattggagtgttggcacaagccaaattccctgctgtaaagaagaaatttatggcggagctaaaagaattacggcacaaagagcagaacccatatgtggttcaaagcattatcagcttaataatgggcatgaaattctttcgaattaagatgtatccagtggaggattttgaggcctctcttcagtttatgcaggaatgtgcacattacttcctcgaggtcaaagacaaagatatcaagcatgccttggctgggctttttgttgaaatacttgttccagttgctgctgctgttaaaaatgaagtaaatgttccctgccttagaaattttgtggaaagcctgtatgacaccacgctggaactttcttctcgaaagaagcattccttggccttgtaccccctggtgacctgtttgctctgtgtcagtcagaagcagctgttcctgaacaggtggcacattttcctcaacaactgcttgtccaaccttaaaaacaaagatcccaagatggctcgagttgcactggaatctctctacagattactttgggtttacatgattcgaattaaatgtgaaagcaacacagctactcagagccgacttataaccatcatcacaacacttttccccaaagggtcccgcggtgtggtaccaagggacatgcctctgaacatctttgtgaaaatcatccagttcattgcccaggaacgtttagattttgcaatgaaagaaatcattttcgattttctttgtgtgggaaaaccagcaaaagcattcagtctcaacccagagagaatgaacattggtttacgggcattcttggtcatagctgatagcttgcagcagaaagatggggaacctcccatgccggttacaggagccgttcttccttcaggaaacacgttaagagtaaagaaaacatatttgagtaaaacactaactgaagaggaagccaaaatgataggcatgtccttatattactctcaagtacgaaaagctgtagacaacattttaaggcaccttgataaagaagtaggaaggtgtatgatgctgactaatgtacagatgttaaacaaagaaccggaagacatgatcacgggtgagagaaagccaaaaatagatcttttcaggacctgtgttgctgctattcctcgactgcttcctgatgggatgtcaaaacttgaacttattgacttactggctaggctctctattcatatggatgatgaattgcgacatattgcacaaaattctcttcagggtttacttgttgacttctcagattggagggaagatgtactatttggctttaccaacttcctgctccgggaagtaaatgatatgcatcacacactccttgattcgtccctgaagttgctgctgcagctgctcacccagtggaaactagtcatccagacacaaggaaaagtctatgaacaagccaacaaaatcagaaattcagagctcatcgcaaatggctccagtcacagaattcagtcggaacgaggtccccactgcagtgtactccacgctgtagaaggttttgctctggttttactctgcagtttccaggtggccacacgcaaactgtccgttttaatactcaaggaaattcgagcgttgtttattgccctggggcagcctgaggatgacgacaggccgatgattgatgtcatggatcagctaagttcttccattctagaaagttttattcatgtagcagtttcggattcagcaacattaccactcacccacaatgtggatctgcagtggttggtggaatggaacgcagtcctggtcaatagccattatgatgtgaaaagcccttcccatgtctggatatttgcacagtctgtcaaagacccctgggtcctctgcctcttcagcttcctccggcaggagaacttacccaagcactgccccacagccctcagctatgcctggccttatgccttcactcggctccagtcggtgatgcctctggtggacccaaatagcccaattaatgccaagaaaaccagcactgccggcagcggagacaactatgttactttgtggagaaattacctaattctttgttttggagttgcaaaacccagtattatgagcccaggacacttaagagcttccactccagaaataatggcgaccacacctgatggtacagtgagctacgataacaaggccataggcaccccatcggtgggagttctgttaaagcagttggtgcctttgatgagactagagagcattgagatcacagagtccttagttttaggatttggaagaacaaattcccttgttttcagagaattggtagaagaacttcatccattaatgaaagaagctctggaaagaagaccagagaacaagaaacgccgagaacggcgagacttgttaaggctacaactacttcgaatttttgaacttttggctgatgctggtgtaataagtgacagcacaaatggagccctagagcgggatactttagccctgggagctttgttcttagaatatgtggacttgacccgcatgctcctagaagctgaaaatgacaaagaagttgaaattcttaaagatatccgggcacattttagtgcaatggtggccaacttgattcagtgtgttccagttcaccaccgaagatttctcttcccccagcaaagtctgaggcaccaccttttcatcttattcagccagtgggcaggacccttcagcattatgttcactcctctggatcgttacagtgacagaaatcatcagattacaagatatcagtattgtgcattaaaagcaatgtcagcagtactgtgctgtggccctgtctttgacaatgtgggcctttccccagatggctacctatataaatggcttgacaacattctggcttgtcaagatttacgagttcatcaacttggctgcgaagttgttgtcttgctactggaacttaatcctgaccaaataaatctttttaactgggcaattgaccgatgctacacaggttcctaccaacttgcatctggctgcttcaaagccatagcaactgtgtgtggaagcaggaactatcccttcgacatagtgacattgttaaaccttgttctattcaaggcctctgacaccaacagagagatttatgaaatctccatgcagctcatgcagatccttgaagcaaagctttttgtatactcaaagaaagtcgctgagcaaagaccgggaagtattctctatggaacacacggcccgctgccacccctctacagcgtgtcacttgccctcttgtcatgtgagctggccaggatgtaccctgagctcacactccccctcttctcagaggtaagccagcgattccccacaacacaccccaacgggcgccagatcatgcttacctacctgctgccctggctgcacaacatcgagctggtggacagcaggctcctcctcccggggtcgagccccagcagcccagaggacgaagtcaaggaccgggaaggtgacgtgactgcttctcacgggctgagaggaaatggctggggctctccagaagccacgtcactggtcctgaacaacctcatgtacatgacggccaagtatggagatgaagttcctgggccagaaatggaaaatgcttggaatgctttagccaacaatgagaaatggagcaacaacctgaggatcaccttgcagttcctgattagcctctgtggggtcagcagcgacacagttctcctaccctatattaaaaaagtggcaatatacttgtgccgtaacaacaccattcaaaccatggaagagcttctctttgagctgcagcagacagagcccgtgaaccccatcgtccagcattgtgacaacccgcccttctaccgcttcacggccagtagcaaggcttccgcagcagcctcaggaaccacctctagcagcaatacagtggttgctggccaggaaaatttcccagatgctgaggagaacaagatattgaaagaatctgatgaaaggtttagtaatgtcatcagagcccacactcgcctcgagtcaagatacagcaatagctctggaggatcctacgatgaagataaaaatgatccaatttctccctacacgggctggttgctgactattacagagaccaagcagccgcagcccttaccgatgccttgtactggaggatgctgggcccccctggttgactatctcccggagaccatcactccccgggggccactccacaggtgcaatattgctgtaatttttatgactgaaatggtggtggatcacagtgtacgagaagactgggcgcttcatctaccattattacttcatgctgtcttcttaggtttagaccactaccggcctgaagtctttgaacacagcaaaaaactgcttcttcacctcttgattgccctctcttgcaacagcaatttccattccattgcttccgtgctcctgcagacccgagagatgggtgaagctaagactctaaccgtgcagccagcctaccaacctgaatatctctatacaggtggctttgacttcctgagagaggaccagtcatccccggtgcctgactcagggcttagttcaagctccacctcctctagcatcagtctgggaggcagcagtggaaacctcccacagatgacccaggaggtagaagatgtggacacagctgctgaaacagatgagaaggcaaacaagctcattgagtttctcacgaccagggcatttggtccactttggtgccatgaagacatcacacctaaaaatcaaaattcaaagagtgctgaacagctcactaattttctacgtcacgttgtatctgtatttaaagattccaaatcaggcttccatctggagcaccagttgagtgaagttgcattgcagacagccctcgcaagctcttcaaggcactatgctggtcggtccttccagatattccgggccctcaagcaacctctgtcagcacatgccttatctgaccttctctcaagattggtggaggtgataggagaacatggagatgagattcagggttatgtaatggaagcgctcctaaccttggaggcggctgtggataacttgtctgactgcttgaagaacagtgacctcctaactgtattgtcccgctcttcctcaccagatttaagctccagcagtaaactaacagcaagcagaaagagcacaggacaactaaacatgaacccgggaaccaccagcggcaacaccgcaactgccgaacggagccggcatcaacgaagcttctctgtgcccaagaagtttggtgtcatcgaccgatcctctgacccacctcgaagtgccacactggacagaattcaggcttgtacccaacaaggcctctcctcaaaaaccagaagctcatcctccttgaaggacagtctcacggacccatcccacataaaccatcccaccaacctgctggccaccatattctgggtcacagtggccttgatggagtctgattttgagtttgaatacttaatggccttaaggctgttgagcagactactggcacatatgccactcgataaggctgagaaccgagaaaagcttgagaaactccaggcacagctgaagtgggccgacttctccgggctgcagcagctgctgctgaaaggattcacatccctcaccaccacagacctgaccctgcagctcttcagtctgctgacaccagtgtccaaaatatccatggtggatgcatcccacgctattgggtttccactgaatgtcttgtgtctcctgcctcagctgattcagcattttgaaaatcccaatcagttctgtaaggatatagccgaaaggattgctcaggtttgtttagaagagaagaaccccaaactttcaaatcttgcacatgtcatgactctttataaaacgcacagctacacgagggactgtgccacgtgggtcaatgtggtctgtcgataccttcatgaagcatatgctgacattaccttgaatatggttacctacctggcagagctgctggagaagggcctccctagtgtgcagcagcccctgctccaggtgatctacagtcttctcagctacatggacctttctgtcgttcctgtcaaacagttcaatgtggaagttctgaagacaattgaaaaatatgtgcaaagtgttcactggagagaagctctgaatatcttgaagctggtagtttctcggtcagccagccttgttttaccttcataccagcacagtgacctctcaaaaatagaaatacatcgagtgtggactagtgcttccaaggaattacctgggaaaaccctggacttccacttcgatatttcggagactccaatcatcgggaggcggtatgatgagctgcagaattcttctgggcgtgatgggaagcccagggccatggccgtcacccggagcacatcttccacttcctcaggctccaactccaacgtccttgttccagtgagctggaaaaggccccagtattctcagaagagaacaaaagagaagttggtacatgtcctttctctgtgtggccaagaagtaggattgagcaaaaatccatcagtgattttttcatcgtgtggggatctggatctgcttgagcaccagacaagcttggtatcttctgaggacggtgcccgagagcaggagaacatggatgacacaaacagcgagcagcagtttagagtcttcagagacttcgacttcctagatgtggagctggaggatggagagggtgagagtatggacaatttcaactggggagtgcgcagacgttctctggacagcctggataagtgtgatatgcagattctggaggagcgccaactgtcaggaagcactcctagcctgaataaaatgcaccatgaggactccgatgaatcatccgaggaggaggacctcacagccagccagatcctggagcactcagacctaatcatgactctctccccctctgaagagacgaatcccatggagctgctcaccacagcctgtgactcgacccctgcagaacctcattcctttaacaccagaatgtccagctttgatgcttccttgcctgatatgaataatctgcagatttctgagggttcaaaggctgaagctgttcgtgaggaggaggacaccaccgtgcatgaggatgatctttctagttccatcaatgaactcccagcagcttttgaatgcagcgacagctttagcctggacatgactgagggggaagaaaaaggcaatcgggcactggaccagtttaccctggcgagctttggagaaggtgacaggggagtctctccccctccctcgcccttcttctcagccatccttgccgcctttcagcccgcagcctgtgacgatgccgaggaggcctggcgcagccacatcaaccagcttatgtgtgactcagatggctcctgtgctgtgtatacatttcatgtgttctcctccttgtttaagaatattcagaaaaggttctgcttcctaacctgtgatgcagccagttaccttggagataacctccggggaatcggatccaaatttgtcagctcttcccagatgctcacctcctgctctgaatgtcctacactttttgtggatgccgagactctcctttcatgtggacttctggacaagctcaagttcagtgtgttagaactgcaagaatatttggatacctacaacaacaggaaagaggccacactctcttggcttgcaaattgtaaggcaacatttgcagggggatcaagagatggagtaattacctgtcaaccaggggactccgaagaaaagcaattggaactgtgtcagagattatataagctacacttccagctgctattgctttttcagtcctactgtaagctcatcggccaggtgcacgaagttagctccatgccagagctgctgaatatgtccagggaactgagtgacctaaagaaacacctgaaggaagccagtgcagtcattgcagctgaccctctctattcagacggcgcgtggtccgagcccaccttcacgtccactgaagcagccatccagtccatgctggagtgcctgaagaacaacgaactcggcaaagctttgcggcagatcagggagtgcagaagtctgtggcccaatgacatctttggaagcagttctgatgatgaggtccagacactactgaatatttatttccgtcaccaaactctgggacagacgggtacttatgccctggtggggtctaaccagagcctgaccgagatctgcaccaagctgatggagctgaacatggagatccgggacatgatccgcagggcccagagttaccgagtcctcactacttttcttccagactccagtgtttctggcactagtctctgacaggagcctcctgtccccactgggttccaaactggcagtgctgccatgctggggcaacgtcattcagtgtcttctcggccttcaaaaggcttggacagactgttctccctcttgttacctgtagggctttttctaaagaggatggcagaacttccaacgtgtagcaatactataagaaccaaggtagcttagaacgtcctggacagactccactcatcatgctgtgtggcacaaatgtgttacatttgaccgagcatatgcaactcgctactgaagaagtgacttccgttgcataccaaagccgactacactgaacagtaccttcctttctagaaacaattttagattggcaaaagtgcaatgttttcttcactcaaaaaattttatattctcaaacatgtatattctttccctgtcttgttccattttcttttcttttttcttttttctttttcctttctttcgtgggctgagaaaggggcaggcaaaatgaagctggccactgaaaactgtaagatggtcaaaagctgacagcctgtgtatgtgaaaagggaattgtaaatggactgcaatgtaatgtacactgtaatttgaatacaattactgtatctaaaaggagctgctatgaagtacctttcttatgttgctaggctactgtttctgaaagccctggatctctttgcaccaaaaatggtccagatagactctttttaaggatcttggctgctttttactagaaggttgcttttatgagcatatttatactgctgaaggatgagtgttaattttaattaactttgccgttttgtagagaaaactattcacaagataaattccaagtcttttcacctgtcaggcatgcatattttaatatctgtttggatagtcagaagtagaatcataaaggtaaaatatgagttgttactttgtttcttcgatgtcatattttatgtgtaatatatatgtaaagggccattcttaagttctctccttaaacttaatgctgtcaagtgttagatgtgtgcatgtgaacttgttgcactgcagaaacatattcagagtttatctatgtaacttattcactctgtaaatacatttaaagtttttgtgatgtaagcttaattgatattctgttcagaactttctttagactaaaaaaaaaaaaaaagacaaaatacaa

SEQ ID NO: 17 - DNA, 5651 bp, Artificial Sequence
  SPEF2
acgcttccatagcaaagggttgcccttggctacaggaggacgcgggctggcaggcttggttcctggcgagtttctaagcccccgcctgcggtctgaggcaccggctgaaccatgtcggagatcctgtgccagtggctcaacaaggagttgaaggtgtcccggaccgtgagtcccaagtcatttgcaaaggcattttccagtggctatctacttggagaagttctacacaagtttgaacttcaggatgatttttcagaatttttggacagcagggtttcaagtgccaaacttaataatttttctcgcttggagccaacacttaaccttctgggtgtgcagtttgatcagaatgtggcccatggcatcatcacagaaaagcctggggtggcaacaaagctgttatatcaattgtacattgctcttcagaaaaagaagaaaagtggactgactggagtggagatgcaaaccatgcaacgtctgacaaatttaagacttcaaaacatgaaaagtgatacttttcaagagagacttagacacatgataccacgtcaaactgatttcaatctgatgcggattacatacaggtttcaagaaaaatataaacacgtgaaagaagatcttgcccatttgcattttgagaaacttgaaagatttcaaaaactcaaggaagagcaaagatgttttgatattgaaaagcaatacttaaacagaagacgacaaaatgaaataatggccaaaatccaagcagctattatacagattcctaaacctgcatcaaatcgtactttgaaagcactcgaggcccaaaaaatgatgaaaaagaaaaaagaggcagaagatgtggctgatgaaattaagaagttcgaagcattaataaaaaaggatctccaagcaaaagaaagtgcatccaagacttctttagatacagcaggccagacaaccaccgatttgttaaatacttactcagatgacgagtacattaaaaaaatccagaagcgccttgaagaagatgcttttgcacgagagcaaagggagaaaagacggcggaaattgttaatggaccagttaatagcccacgaagcacaagaggaggcttatcgggaggaacagctgattaaccggctgatgcggcagtcccagcaggagcgcaggattgccgtgcagctcatgcatgttcggcatgaaaaggaagttttatggcaaaacagaattttcagagaaaaacaacatgaggaaagacgacttaaagatttccaggatgctcttgatcgagaagcggctttggcaaaacaagccaagattgactttgaagaacaattccttaaagaaaagagatttcatgatcagattgctgtggaaagagctcaagctcgttatgaaaagcattattcagtatgtgcagaaattttggatcaaatagttgatttgtccactaaagtggcagactatcgaatgttgacaaataatctgattccgtataagttgatgcatgattggaaggaactattttttaatgcaaaacccatatatgaacaagcctctgttaagacactacctgctaacccctcaagagaacaacttacagaactggagaaaagggacttgctagataccaatgattatgaagaatataagaacatggttggagagtgggccttaccagaagaaatggttgacaatttaccaccctccaacaattgcatactgggccatattcttcacaggctagctgaaaaatctcttcctcctcgagcggaatcaacaacacctgaattaccttcatttgctgttaaaggatgcttattggggaaaacattaagtggaaaaactaccattttaaggtctctacaaaaagactttcctatacagatactttctattgacactcttgtccaagaagctatccaagcatttcatgacaatgaaaaagtcagtgaggttctaccaattcagaaaaatgatgaagaagatgctctaccagttctgcaagaggagattaaagaaagccaggatccacaacatgtattttcagctggtccagtttcagatgaagtattaccagaaacagaaggtgaaacaatgcttagtgctaatgctgataaaacaccaaaagctgaagaagtcaaatcaagtgatagtttcttaaaactcactacacgtgctcagcttggtgcaaaatcagaacagttgctgaagaaaggaaagagcattcctgatgtgctgcttgttgacatcatagtaaatgctattaatgagatacctgtgaatcaagactgtatcctagatggttttccaatgactttaaaccaagcacagcttctggaagaagctcttacaggctgcaatagaaacctcacagaagtggaaagaaaaaaagcacaaaaatccacattggctattgatcctgcgacttccaaagaaatacctcttccctctcctgcatttgattttgtcatattattagatgtttcagatacttcctcaatgagtcgcatgaatgatattatagctgaagaattgtcctataaaactgctcacgaagatatcagtcaacgtgtagctgctgaaaaccaagataaggatggagaccaaaatttaagagaccagatacaacatagaattataggcttcttggacaactggcctttattggagcaatggttttcagagccagaaaatattttgataaaaatcaatgctgaaatagataaggaatctttatgtgaaaaagtaaaagaaattcttacgactgaaatagcaaaaaaaaagaataaagttgagaagaaattagaagaaaaggaagctgagaaaaaagcagcagcttccctggctgagcttccacttcctacacctcctcctgctcctcctcctgaaccagaaaaagagaaggaaattcatcaaagccatgtggcttcaaaaactcctactgcaaaaggaaaacctcaatcagaagccccgcatggtaagcaagaatctcttcaggaaggaaaagggaagaaaggtgagaccgcactcaaaagaaaaggttctcctaaaggaaaatcatcaggaggaaaagtaccagtaaagaaatcacctgctgactctacagatacatcacctgttgcaatagtgccacagccacctaagccaggatcagaagaatgggtctatgtgaatgaaccagttcctgaggaaatgcctttgtttttagtaccttactgggaactaatagaaaattcctatataaacaccatcaaaacagtactcaggcatctgagggaagaccagcatactgtgcttgcttacttatatgagattagaacaagtttccaggagtttctaaagcgtccggatcacaagcaagattttgtagctcaatggcaggctgatttcaactcccttcctgatgacctgtgggatgatgaggaaacaaaggctgaactacatcaacgagtgaatgatctgcgagaccgcctgtgggacatttgtgatgcccggaaggaagaggcggagcaggagcggcttgacatcattaatgagagctggttacaggacactcttggaatgacaatgaaccatttcttttccctgatgcaggcagagctgaaccgtttccaagatacaaagagactccttcaagattattactggggaatggaaagtaaaatcccagtagaggacaacaagagatttactcgaatccctttggtccaactggatagtaaagacaattctgaaagccagcttagaattcctctagttcctcgaatatccatttctctggaaacagttacacccaaaccaaaaacaaaatcagtactgaagggcaagatggataactccctagaaaacgttgagtccaactttgaggccgatgaaaagttggtcatggacacctggcagcaggcttctttagcagtatctcacatggtggctgctgaaattcatcagaggcttatggaagaagaaaaagaaaaccagccagcagaccccaaagaaaaatctcctcagatgggtgcaaataaaaaagtcaaaaaggagccacccaagaaaaaacaggaagacaaaaaacccaaaggtaaatcaccacctatggcagaagcaactcctgtcatagtaacaacagaggaaattgctgaaatcaaaaggaaaaatgaactgagggtcaaaataaaagaagaacaccttgctgccttgcaatttgaagaaatagccacgcaatttcgacttgaactgataaagacaaaagcattggctcttcttgaagatttagtaacaaaggtggttgatgtatataaactcatggaaaaatggcttggtgagaggtatttgaatgaaatggccagtacagaaaaattaactgacgtagctcgctatcacattgaaacatctacaaaaattcagaatgaactttatttaagccaagaagacttcttcattaatggcaatataaaagtcttcccagatcctcccccatcaatacgtcctccacctgtagaaaaggaagaagatggtaccctgaccattgaacagcttgacagtcttcgagatcagttcttagatatggcacctaaaggcataataggaaataaagcatttactgacattctgatcgatttggtgaccctgaaccttggcacaaacaactttcctagtaattggatgcaccttacccaacctgaattacaggaattaacatctttattaacagtcaactccgagttcgtggactggcggaagttcctgttagtaacctcaatgccttggcccattcccttggaggaggagctccttgagacccttcagaagttcaaggctgtggataaggagcagttgggcaccatcacttttgagcagtatatgcaggctggtctgtggtttacaggagatgaagatataaaaattccagaaaatcctcttgaaccccttccatttaataggcaggagcatcttatagagtttttctttaggctatttgctgactatgagaaggatccaccccagcttgactacacacagatgctgctttactttgcttgccacccagacaccgtggaaggagtctacagggccctcagtgtggctgttggaactcatgtcttccaacaagtcaaagcttccattccaagtgcagaaaagacctcctcaactgatgcaggtccagctgaggaatttcctgaacctgaggaaaatgctgcaagagaagaaaggaaattaaaagacgacacggagaaaagggaacagaaggatgaagaaatccctgaaaatgcaaacaatgaaaagatgtccatggaaacactactcaaagtgttcaaagggggaagtgaagcacaggactccaatagatttgccagccacctaaagatagagaacatttatgcagagggcttcataaaaacatttcaagacctaggtgccaagaacctggagccaattgaagtcgctgttctcttgaagcatccttttattcaagacctgatttcaaattattcagactataagtttcctgatattaaaataattctccaaaggagtgaacatgtacaaggaagtgatggagagagatcaccttcaagacatacagaggaaaagaaatgaagacaaaagagtgtgatttttttaattctgcaataaatcttccaaaaattaaatgtgaaaaaaaaaaaaaa

SEQ ID NO: 18 - DNA, 2686 bp, Artificial Sequence
  C16orf54
ctctacgtctgagaggcggaccgccctgcaccctccaagcctgcacctcttagtccagcaccaggaagagtggctctaggagggagaggagcccagggactgacccaagatgccgttgactccagagccgccctctgggcgcgtggaggggccccccgcatgggaagcagccccatggccctcactgccctgtgggccctgcatccccatcatgctggtcctggccaccctggctgcgctcttcatcctcaccaccgctgtgttggctgaacgcctgttccgccgtgctctccgcccagaccccagccaccgtgcacccaccctggtgtggcgcccaggaggagagctgtggattgagcccatgggcaccgcccgagagcgctctgaggactggtatggctctgcggtccccctgctgacagatcgggcccctgagcctcccacccaggtgggcactttggaggcccgagcaacagccccacctgccccctcagccccaaattctgctcccagcaacttgggcccccagaccgtactggaggtcccagcccggagcaccttctgggggccccagccctgggaggggaggccccccgccacaggcctggtgagctgggctgaacccgagcagaggccagaggccagcgtccagtttgggagcccccaggccaggaggcagcggccagggagcccggatcctgagtggggcctccagccacgggtcaccttggagcagatctcagctttctggaagcgtgaaggccggaccagtgtggggttctgaatccccagggttccccagagatccccgaggcaggccttgcctcagtgggaccggggaccccaggatccagcattaggattgagactgccccagcgaagatgcccttcccaggctccttccacctggagtccccctccccgggtctgggtggtggccaggctatgtggactaggggaagcccagcagtgcctctgctcagctacctgggctgtggctcagagacctgggggtggagccaatgccaggccagaagccttcaagatcgcatccagatgaagaacccaaggtactagatagtcaggaaatggcatcgaccagccacctccaccttctttcagtgtttaccgaagccaccaataccaaagagaacgggtcctgcggtgctgaacagcctcggtgtggcgatgacagctggcaggagatgacaggaatccagtttcccagagccacaaatcctgttctccttggccactcacccactgtgaggtcctctaggaaaatacacaaagagaggaccagaccaggcagaggaacattttgtttcatatgaactgtggctttgacccccaaactgcaaggaggaacttgctgggccaagctgcagcggcgctgtcttgctggagtggggacctagagtcagagaaaacccacaggctcctctgcccattctcctccatctgcacacgtctcagcctcggaccctcaccactccatggtgaggaaggccatggccaggggaaactgagtttcatccaatgtggagaggagcgttgtcctagagcagggcaactcccaaactgtgacctctgatcatcgtcccttccagcttgctggagtgtccagagagacagatttgccacaagctaggcttacttataatgctccaccctacagaaatgggaccccaagtacccaatcttccctttaggagaggcaggcaggtgggtgagcagcagatgtagtttccatttccctgggggtttaattttccaaactttgtcttttttttttttttttttttttttttgagacagaatctcaactctgtcacccagactggagtgcagtggcacaatctcaactcactacagcctcgaactcctaggctcaagcgatcctcccacctcaacctctagaatagctgggactgcaggtgcataccaccacgcccagctaatttttgtattttttttgtagagacacggtctcaccatactgcctgggcaggtttccaactcctgggctcaagtgatccagcagccttagcctcccaaaatgctgggattacaggtatgagcactgcacccggccacttttttttgtttttgaaacagggtctcactctgttgcccaggctggactacagtggcacaatctcagctcactgcggccttgaactcctgggcttaagtgatcctcccacctcagtctccctagtaggtggaactacaggcatgtaccaccacacctggctattttttttttttagagacagggtcttgctatgttgcccaggctggtctttaattcctgggctcgagagagccactcatccccatctctcagagtgttgggattacagccatgagccaccatgcccggccaaacttcagccttgaatattagtgattttgccatattagtttaccatctgtacaattatttgctttatatttttctttaaattggctcattattcacttaatgaaattattgcaacaggaatcttttgtatcacttctgtaaatggaaaaccagtctcatttgccatcaatagaaggtaaaacatgaaaataaatacaatgtaaacaaaaaaaaaaaaaaaaaaaaaaaaaaaaaaaaaaaaaaaaaaaaaaaaaaaaaaaaaaaaaaaaaaaaaaaaaaaaaaaaaaaaaaaaaaaa

SEQ ID NO: 19 - DNA, 2564 bp, Artificial Sequence
  CBARP
gcgcagcgggggcggcgggccggggaccgggcagcaccgggcgcgcggagcgggcgcgccgccaacgcggtcacgtgcgcggcccctcctctcgcgccggcctcccccgcgccgcgctctccattcataaattctccgcctgctccgcggccaccgggcgccggagccagccgcgagcgccacgcagccgcccgccgccagcccgccgcccatgggccgctcgtcccggcgctgagggccctcctccccagttcagaatgcagcccacagccaccatggccacagccgccaccaccaccaccaccaccactgccacagtagccctgacgacgtcgtgggacaatgccactggacgccccacggcagagccagaccccatcctggacaactacgtgctgctggtggtggtgatgtcgctgttcgtggggggcacgctggtggtgttgtctggcgtcctgctcctctgcaagcgctgctgggacgtccaccagcgcctcaacagggccatggaggaagcggagaagaccaccaccacctacctggacaacggcacccacccagcccaagaccccgacttccggggagaggaccccgagtgccaggatgcggagaccgaacgcttcctgtccaccagctccacgggccgccgggtctccttcaatgaggcggcgctgtttgagcagagccgcaagacgcaggacaagggtcgccggtacacactgacggagggggacttccaccacctgaagaatgcccggctcacgcacctgcacctgccgcccctcaagattgtcaccatccacgagtgtgactcaggcgaggccagctcagccaccacgccccacccggccacctctcccaaggccactctggccatcttccagcccccggggaaggccctcaccggccgctctgtgggccccagctccgccctgccaggtgacccctacaactcagccgcgggcgccactgacttcgcagagatcagcccctcggcatctagcgactctggggaaggcacctcgttggatgccggtaccaggagcaccaaggctggagggcccggggctgcagcagggcctggggaggcgggcccgggatccggggcaggtaccgttctgcagttcctcacccgcctgcgccgccatgccagcctggatggggccagcccctatttcaaggtcaagaagtggaagctggagcccagccagcgggcagccagtctggacacgagaggttcccccaagcggcaccacttccagcggcagcgggcagccagtgagagcacggagcaggaggagggggatgccccccaggaggacttcatccagtacattgcccgggcgggcgacgccgtggccttcccgcacccccgcccctttctggccagcccgccccctgctctcggcaggtatttttcagtagatggaggtgctaggggtggacctgtgggcccttgccccccttcgcccccccctaggcggcccagggagcgctctccaggccccgtggacacgcgctcgcctgcctccagcggcaaggcccctcccagaggcggactcactggggccacctctccagcatggaccagaggagggaagcagggagagactgggtaagggtagggcggtgggtggggaggaggggccccccgaggatggcgctggtactgctgcttgctggtggagtccgaggcctgaagggttctgctgtggtcccaggccctctcccacccccgccccgcccatgctcccaaggctgggcagactcctctcagaagctgctgtgaccactccggccagcagcacccctcccccaacccaagggcaacttccctgaagcccagggcccacgtcggtgggatgggaatggggcgtggggctggggcagagcagggttcctggggcagccctggtatggcgggtgaccctcacgtctgtgcactgtcctcctgctggttatccagcatgggtgggcagagagccctagcctggagcaggggctgagctggactcaaccgcgtccagtccatcccctgcggctcccacgtccactgggaggctgggaaaacgtgactcccggagagaagcatgttgacttttcctgggggcttccaagggagggggccccgccgtctgcagtccagcatggaggcaccctgcttaataagcaggcgccacagctcagggtcaatgcaagacgcatcccctgcaaaacacactggctcattttaaagctctcaccttccaaggcccgcccgagtcccaagtcccacccgcgtccaccctccctgatccagaggcgggatggccggccgggtagggggcgcggggctcggcggggctctgacggcgcggcctggcttgcaggctagaggcggccgaggcagcgggaggagcgagccccgattcccccccggagcgcggcgcgggcagcgcggggcctgagcagcagcagccgccactggagccggacgccgagcgggacgcgggccccgagcaggcccagaccagctaccgcgacctgtggagcctgcgcgcctcgcttgagctgcatgcggccgc

SEQ ID NO: 20 - DNA, 1954 bp, Artificial Sequence
  PMAIP1
actggacaaaagcgtggtctctggcgcggggatctcagagtttcccgggcactcaccgtgtgtagttggcatctccgcgcgtccggacacccgatcccagcatccctgcctgcaggactgttcgtgttcagctcgcgtcctgcagctgtccgaggtgctccagttggaggctgaggttcccgggctctgtagctgagtgggcggcggcaccggcggagatgcctgggaagaaggcgcgcaagaacgctcaaccgagccccgcgcgggctccagcagagctggaagtcgagtgtgctactcaactcaggagatttggagacaaactgaacttccggcagaaacttctgaatctgatatccaaactcttctgctcaggaacctgactgcatcaaaaacttgcatgaggggactccttcaaaagagttttctcaggaggtgcacgtttcatcaatttgaagaaagactgcattgtaattgagaggaatgtgaaggtgcattcatgggtgcccttggaaacggaagatggaatacatcaaagtgaatttctgttcaagttttcccagattatcattctttgggatgagagaacattataaaaccactttgtttattttaaagcaagaatggaagacccttgaaaataaagaagtaattattgacacatttcttttttacttagagaatcgttctagtgtttttgccgaagattaccgctggcctactgtgaagggagatgacctgtgattagactgggcggctggggagaaacagttcagtgcattgttgttgttgctgtttttggtgttttgcttttcagtgccaactcagcacattgtatatgattcggtttatacatattaccttgttataatgaaaaaactcattctgagaacactgaaatgttatactcagtgttgatttcttcggtcactacacaacgtaaaatcatttgtttcttttgactcaaattgtattgcttctgttcagatgatctttcattcaatgtgttcctgttgggcgttactagaaactatggaaaactggaaaataactttgaaaaaattggataaagtataggagggttacttggggccagtaaatcagtagactgaacattcaatataataaaagaacatggggattttgtataaccagggataataaaaagaaaaaagaagttaatttttaattgatgtttttgaaacttagtagaacaaatattcagaagtaacttgataagatatgaatgtttctaaagaagtttctaaaggttcggaaaatgctccttgtcacattagtgtgcatcctacaaaaagtgatctcttaatgtaaattaagaatattttcataattggaatatacttttcttaaaaaaaaggaacagttagttctcatctagaatgaaagttccatatatgcattggtgaatatatatgtatacacatacttacatacttatatgggtatctgtatagataatttgtattagagtattatatagcttcttagtagggtctcaagtaagtttcattttttttatctgggctatatacagtcctcaaataaataatgtcttgattttatttcagcaggaataattttatttattttgcctatttataattaaagtatttttctttagtttgaaaatgtgtattaaagttacatttttgagttacaagagtcttataactacttgaatttttagttaaaatgtcttaatgtaggttgtagtcactttagatggaaaattacctcacatctgttttcttcagtattacttaagattgtttatttagtggtagagagttttttttttcagcctagaggcagctattttaccatctggtatttatggtctaatttgtatttaaacatatgcacacatataaaagttgatactgtggcagtaaactattaaaagttttcactgttcaaaaaaaaaaaaaaaaaa

SEQ ID NO: 21 - DNA, 3843 bp, Artificial Sequence
  PAGR1
ggcgccgtgtccgggtgtggagaggggcgtcgtggaagcgagaagagtggcccgtccctctcctccccctttccctctttcggaaagtggtttctgcggggcccgggagcctcggagtaccgaacctcgatctccggggcggggtccttggtggggactgagcgccccctcccggggacgggcggtctggccgcggagtcccctgcgggagcgtgattggctggaaacggtcccgaacccccaggggagcccgatccctgggggaccctggcttcggactccagtatctgtcgtcgcagggtccctgccctagtggcctatgtcccttgctcggggccatggagacactgcggccagtacggcggcgcctctgtctgaagaaggggaagtgacctccggcctccaggctctggccgtggaggataccggaggcccctctgcctcggccggtaaggccgaggacgagggggaaggaggccgagaggagaccgagcgtgaggggtccgggggcgaggaggcgcagggagaagtccccagcgctgggggagaagagcctgccgaggaggactccgaggactggtgcgtgccctgcagcgacgaggaggtggagctgcctgcggatgggcagccctggatgcccccgccctccgaaatccagcggctctatgaactgctggctgcccacggtactctggagctgcaagccgagatcctgccccgccggcctcccacgccggaggcccagagcgaagaggagagatccgatgaggagccggaggccaaagaagaggaagaggaaaaaccacacatgcccacggaatttgattttgatgatgagccagtgacaccaaaggactccctgattgaccggagacgcaccccaggaagctcagcccggagccagaaacgggaggcccgcctggacaaggtgctgtcggacatgaagagacacaagaagctggaggagcagatccttcgtaccgggagggacctcttcagcctggactcggaggaccccagccccgccagccccccactccgatcctccgggagtagtctcttccctcggcagcggaaatactgattcccactgctcctgcctctagggtgcagtgtccgtacctgctggagcctgggccctccttccccagcccagacattgagaaacttgggaagaagagagaaacctcaagctcccaaacagcacgttgcgggaaagaggaagagagagtgtgagtgtgtgtgtgtgttttttctattgaacacctgtagagtgtgtgtgtgtgttttctattgaacacctatagagagagtgtgtgtgttttctattgaacatctatatagagagagtgtgtgagtgtgtgttttctattgaacacctattcagagacctggactgaattttctgagtctgaaataaaagatgcagagctatcatctcttaaaaggaggggctgtagctgtagctcaacagttaggccccacttgaagggagaggcagaattgtactcacccagattggaaaatgaaagccagatgggtagaggtgccctcagttagcacctgtcccatctcgggccctccaactcctcccagtcccactccagtgcagccagctggctccaaggtagaaacccatgagcactcagggagcagtgtgccttcagctgcagcagaagcagcccggaggataaaatgagaaccagctgcacacgggccctttaactcccaagccccacccctgggcttggcctgccttgccctgccgggaagtgatccccaaggcagggtgagagttccccatctgaggcgtttgttgcagctacctgcacttctagatgtgagtacattgtactagccccccaaaccccaaatcaggggcagatctttgtatcccttgaggctctctttagtcctgtcttgctttgaagggccttgcttctgctggggcagggaaaacatgtctgaatcagagtggggaaggaggatgggtggtggctttgcttttggaggtttcactttccaatagttgggagtcttctgggttttgaagtaaaggcagattaacaccaacaccggtcccccacccccctgcaactctcaggcctctctctgacttcagggtcccacctgggaaatcaggtggggaaccttacagggtcattcagaccccatcttagccctagatcggtgcttgctctactcacctgcactgtcctggggacctgggctctggcctgtcaccttgagctccaagaatgtgacctgtacccattcaggccccttaactctgacagatgagggtttcttactcctccatgcagggctgggccagctgttggtctcagtcgatcattcaggaagtcattagcagagtgatttccagaaggcgtagaatttagtgaccaaggttctttcctttttgggaggagaaagtgaaaactaggatgctcagctggacccaccagcctgagattctggggattttagagctgtcccttggggagccaagcacttgggggtggaggtgatagcgaggctgatggcccctgtgttctcagctctctgcctgggtagcccctgggtgatgggggagaggccagctgtcacgtggggtatcaggtggctctgccagaaactcccttggcacacagagcactgggtcggccctcgggtgtggctgtttgggcaggacagccctctgtatgtagccttgagcaggtaggggggccaccttgagtgggtggcccagagacagcctcagggctccaaggtaacggggtgctcaggttatcttgggtgctgccctcccaggttctgggggagcagaggctgggcgctggcccaacttacaggaaacactcacctttgaactgccattagcaccatctgggcagtacacagccccacccaggtcctctagttcttgttctcggcttagaatctttgtgtttctgcctgagaagccactgcctcctagtttgtggtctctacagttatagccaggttggacttccggctccgtcctttgataactgtgtgctcttgggcaaatttcttaacttgcaggttcttgtgaggataacatgagttaattgagggcacttaacactacctggcacagattaagctcatctgaagtgggagctgttacttaggggcgtttgcctagaacacagggtccagaggctctctcccggaaacttagacccagtgagtcagaagtgaggcctgcaaaaagcagcaggagtggggttaagaattccagcctagggctggatgcggtggctcaggcctgtaatcccagtactttgggaggcccgaatgggaggatggcttgaggccaggagttccagaccagcctgagcaacatagcgagaccctgtctctgtttgtgtgtgtgtggttggggttttgttttttttttttttttaaagaattatagctcagtcctatgattaggcaagttgagaaaatattgatgaagatcaggggtgctgaagcctggttcctggggtcgcttctgatctaggcggttcttgcctctggtgactggtgttaattggcaggagtgggaggagggaggacaagtggaagtctaggctggctgagctgttctgtctcgaaaagttcctaaaactgtgctgctttaaaaaaaaaaaaagtaatttatgagacacattctcaatttccattaatcatctcctaaagggggtaaaccaggaagccgctgggtgaaaacaggctgttggcaattcctgagtcatgtgacccattctctaaagactagaatatttaacttaaatcagtgagaaactctgtgaaaaaaaaaaaaaaaaaaaa

SEQ ID NO: 22 - DNA, 3979 bp, Artificial Sequence
  LIX1
gaacccgcctgtcagccagcctttcgagctaattagctcagcatacaacaaagataagtgagcctgggaagagggccccctgaggggtctttagattctgggaaatgtctgattggcagatgttaaaagggattccttggtaatccagtgcatcaatgagctgcagaaattcagcccaggactgcaagaattcaggcatgaggacactctgtacaggaggctcacacaggcagacccaagatggacagaaccttggaatctctgagacacatcattgcccaagtcttgcctcacagagatccggctctagtcttcaaagacttgaacgttgtgtcaatgttacaggaattttgggaaagcaagcagcagcagaaggctgcattcccaagtgaaggtgtggtggtctatgagtcactgccagctcctgggcctccctttgtgagttacgtgaccctcccagggggaagctgttttggcaactttcagtgctgcttaagtagagccgaggccaggcgggatgcagctaaagtggccctgatcaactccctcttcaatgagctgccctctcgcaggatcaccaaggaattcattatggaaagtgttcaggaagcagtagcctccaccagcggcaccttagatgatgcagatgaccccagcaccagtgttggggcctatcactacatgctggagtcaaacatggggaagactatgctggagtttcaggagctgatgaccattttccaactattgcactggaatggaagcctaaaagcccttcgtgaaacaaagtgttcccgacaggaagtcatctcctactattctcagtattctctagatgaaaagatgcgcagccacatggccctggactggatcatgaaggagcgggactcaccaggaattgtctctcaagagctacgaatggccctgaggcagttggaggaagccaggaaagcaggacaagaactacggttttacaaagaaaagaaagaaatattgagcttagccctgactcagatctgcagtgaccctgacacttcctcacccagtgatgatcagctgagccttacggccctgtgtggctatcactagcaaggccaagccccgggtaccctcagtgatggcagaggccagattaacattaggaatctcagtgcagaggtcctcagaggctccagcatctctagtactacctgaaggctctcctaaccctctccacacattccatttacagagtatgagagtcgtaggacccttacaagacccaacaagccactcgatgcatttttctatcacattctcaatagttccagctcaggatgaaaggatagacacaaaattgtttgaaaaacattttccaggcctggctccaacctaaagcctgactgtcacgtgccttgcttgattttatatatattgtttcaagaatagtccaatatagcattccccaaatgaacagcagccagaattaggtgaagtagcatgatagcagtgtttaaaaatacttaggattaaataaataatatggattgttttaaaaaatatccaaggatcagagtctctttctaagctttgtaagctaagcaatagtttatgtcctactagatacactgcaaactacagtggggattttatctggacatcccaccatcaaagatcttgaaatagtaatagtatgaaaatactagataaaattaatgtttaaaatgtttttgtaacaataatttttaaaacccacactcttccatatatggggataaatatcacctagaaaagtagcctcactcttattcctcaagaattaatatccaatgtttatgagtcttgcaatcaattttgttcatttttaatttgcaaatcgataacctgaactaatttgttcttattttttgccactgcaaacatatatctacagagagaaaaattaatggcattttaaaggttaaaacattttgaaaaattattagcatgtaacaaagaatgcttgcatttgattagtttcaccagcatttgagagaaggaccctttagctctgtttgttgttcaagaacataagcaaccagtagctcaaatgtagtatcattattaagtttaagtcactggaatcttctttaaaggaaggataagacattgccatctctatttaactcatccatatgggtcaatcaactgattagaaaatcaaaaaacaataaaaactttttttttttttttttttttagtagagacgggatttcatcatgttgcccaggctggtcttgaactcctgggctcaagccatctgcctgcctccacctcccaaaatgctgagattacaggtgtgagccaccatgcctggcctaaactaatttttagatagttcctggtcactcaaatttaagaatgtcagcaatgtcaattttaaatgctcataggtctttccatatctgtaacatgaaaatgattattctgcattttattcagtagtccaaattaaagaaaatgtttttctcaatttaaaataatttctttttcttttgtttatgcaagtgcatacatgcttcactgaaagcaaaaccattataattacattaaagtttataaaatatgatattttaacctcatatctaataagtatgtacaaaggtaaccatcactccttaaatccacatgaaaactactgtaactgatcatgtattttggaattagacttgataataaaagattatcatgtatcacatatctcacaccaggggaacaattagctacataattgtcataccttaatatcttttaaaggtaacagtaattttcaacacattttattttaaaatattattttaacaaaagttacattcctctccacaatgaggctaaatgtcacccacgaaagaactttattcccttatattcctgaaaagaaatcagaattaacatttttatgttgaataaattttaaaatttaggaaatgttctatttaaagttaatttctttcataaagccattactctttacattgtcatttccaaaaagccacaatttcccatgctggatgtgatgaaagttaggcacacctttactgcattagcagcctttgacaatgacttcctcaaactgacaccatcttaattagatgcagggacagggatcagatgggacaatatcaaatttactttgtgccctacaagttaaaaactgcacccattctgtaaattgaatatagaggttctcccttggccactgtcagcttttcttgactggccaaaactgcccattcttcctggaatggtatgaaagcttcagcaaaataaataaaagtcagaatctttgctggtccctttaatgctgatttgatagtaaatcaatttcagctgagacataagggctgtcagtctatcatataaacatctttaactatagcctagagaaaagagggttgaagagcaaagcagattttttttttccttttctatatcttgttctgaacaacacactgtgataaaggggactagagtggaagattccctatttaaacacatgaagctctgggtcctagccttttttggttataagccctttgagaatctgataaaagctgtggatcatctcctaggaaaatagaacaaaacatacatattcacattacacagttccagagtatgtggaccccccaaagtccagagattgccctaggggatctttagattcttgtttagaactgttgattttgaacacaacatacactgtcaaactttacatcagggatccaacataactcagacatagcccaggtagcctgtttctaacacaactgtcataatcctgaaatccaaaattgcactgtgtttgacatgagatagtttaagttccacaaaatccaaatttaccatattattgtttttaaaaaagcagtttagagcaaactgtcactaaacttggataaatgggtcagaaagtacagatttaataaagtcgtacctctaatgttcaaaaaaaaaaaaa

SEQ ID NO: 23 - DNA, 3855 bp, Artificial Sequence
  CA13
actttcctctcccgagtgacgactcctcagaaggcaggagatcccccccggaaacctttctctctccgtctctccctctaactcaaatctctcattcccgagtccaaactaagagagactcgcgccccaggagtcagccagcggcgcgggcgccttccccgcacgcctctgccgtctggaggacgcaggcgggagcgccccggaccgggttcacggtctcgcactcctgccgccggcgccccgcggtcccgccctagcaggctccttcccgggcccctccccgctccctcctctttctcgctgctcagtcacatctttctcttccttccaccccgagggaccatgtcgaggctcagctggggataccgcgagcacaacggtcctattcactggaaggaatttttccctattgctgatggtgatcagcaatctccaattgagattaaaaccaaagaagtgaaatatgactcttccctccgaccacttagtatcaagtatgacccaagctcagctaaaatcatcagcaacagcggccattccttcaatgttgactttgatgacacagagaacaaatcagttctgcgtggtggtcctctcactggaagctacaggttacggcaggttcaccttcactgggggtccgctgatgaccacggctccgagcacatagtagatggagtgagctatgctgcagagctccatgttgttcactggaattcagacaaataccccagctttgttgaggcagctcatgaaccagatggactggctgtcttgggagtgtttttacagattggtgaacctaattcccaactgcaaaagattactgacactttggattccattaaagaaaagggtaaacaaactcgattcacaaattttgacctattgtctctgcttccaccatcctgggactactggacatatcctggttctcttacagttccacctcttcttgagagtgtcacatggattgttttaaagcaacctataaacatcagctctcaacagctggccaaatttcgcagtctcctgtgcacagcggagggtgaagcagcagcttttctggtgagcaatcaccgcccaccacagcctctaaagggccgcaaagtgagagcctctttccattaaaaattgtcaccaatgaactcccccaaacatggctgtggagagacaacaaaacaaaacaaagcacaaaagtctctgccaacaactcttttgtggaattctaatttataggaaacattttagtatgagcttcagtgtcacaaagaaaaccagatctctctctcttttttttttattttttttagtgatagagtctcactctgtcacccaggctggagggcagtggtacagtcttggctaattgcagcctccaactcctggactcaagtgatcctcccacctcagcctccagagtaagtaggaccacaggcatgcacaagcatgcctggctaatttttaaattttttttttttaagaaatagggtcttgctatgttgcccaggctggtctcaagctcctgccctaaagtaggcctcctgcctttgcctctcaaagtgctgggatttcaggcatgggtcatcaagcccagctgacccagagctctttactaacttatctgtctcttatttgcactcatggatattcacagtaagcattgtttgacatatattaaaacccatgaaatatgtctacttcaacctgtgtgaaaatatagttaacattgcaaactttagaatgtattaaaaattttaccttgccatagagactgaattagtcacagctctcagtgatgttagatggaaacttatatctcaaatgataggattgtgatgctttttttgtaacaagtgattctgcttaatattttgttattccagttcataaaaagtagattacgttttcctataaggataatttttgcagtgattatattgctaactctcattgcatgatacctttaataaaatgaacaatataagagttaagggcaatgggataaagctacttaatgtgtctcctccactgatcaaaaatattccatatagtcttggtgaggaattccccaggatataaatggctatttacactgtaatgaattataccatatatgatattcactcagtaatgttaataatgaactggctaataattgacaagatgcagtgcctgccagtttatgacattaacttggtttgaaactaacatatgacatagtaccagtgcagtcagagctgcccttaggcatgatgaacatgtggcccgtttttgcctggtgttttggcagcaaagcaggaagcaattttgtgtgggtcattgttctgtcaatttgtggaaaaaattacttcagtctcatataaatatagaatgggtccataaacccttcaactcatttccatggcaaaactcacttttctttttatacatgtccttcagtctcttaattttgtcaggtggagcttgatcttaattttaacctattatcttttatttttgtttgtttttggtgaaggataagagtggtgtttcttttgccctttctggtacaaacagagggacactaagcattaacttaataatcacatttaagacttgaacacatgctacccttttgtcatcttctgacataagtttacctgagtttccttgatttggaagatttgtttcttttatctctcttcctctggatgtagtttttttttgttttttttttgtttttggacggagtcttagtctgtcactgaggctggagtacagtggcacgatcttggctcactgcaacctccatctcccgggttcaaatgattctcctgcctcagcctcttgagtggctgggattacaggcacatgccaccacacccggctaatttttgtatttttagtagagatgggttttgcaatgttggccaggctggtctcaaactcctgacctcaagtgatctgcctgcctcggcctctcaaattgctggaattacagttgtgagccaccacacctggcttgaatgtagattttaataattgaatttattctgccgtgttgatagaataactgaatatcagtaaattgtgtaacagtggtggatactgttgcataagatgagctcctgaagagtgaagctaattctttggtcaatgttcttttcccctcagtgtctagtttaaggcttttagaagattgatctgtagcaattatttaatgaattgaatatttaaaaaattttttatttgctgtctttggtaattatctctctgcttgaaattaaatgcactataagttaatataacaagtaaaatacattgtcttttgaaaatagtttctttttaaaggaatactaattaattgtaacttgtaaaaccaaaagttctaatggtttttaaaaaccagtgttgagtggaaaagtgtttctttagtttggaaagacctgtgaagtatcctagtcagggaaagaacctgttttctggaagaatgtaagttgctatatgtggaggggcatgtaggacaggggttctaattactgtctgtgagagttactactttgtaacttatggtttctgcttcagtattgtgttggttctgtattataaattgcaccttaatagaccaaaaatatctatacagcactgatttccttgaatattgtgtgttaattgatatatcttctagaggcaaaaggtttaaatgtgttaaaatggttatattgcctcctttttaaacaaattaaagagttgtaaatactagtgtagatctcttttgtttaccacagcaaatactgattttatgattgttaagcatttcatattttaatttaaattggattcaaccacaataaagaaaatgagaaaagcttt

SEQ ID NO: 24 - DNA, 2645 bp, Artificial Sequence
  TMPRSS11B
agcacataagtcaaaagctgcgtcagaaggttctaacttttgtcatcactattaccagcattgtcatcgttatcgttatcttcgtcatcatcattaccaccgttatacctgatactgccataacaatcagaacattatgtacaggcacggcatatcttcccaaagatcttggccactatggactacgatctttatttttcttggagtggcggcaatcttgggagtaaccattggtcttcttgttcattttctggcagttgagaagacttactattatcaaggtgattttcatatttctggagtcacatacaatgataattgtgaaaacgcagcttcacaagccagcacaaatctaagcaaagatattgagactaagatgttaaatgcatttcaaaattccagtatatataaggaatatgtcaaatctgaggtcatcaaacttctgcctaatgccaatggttcaaatgtgcagttacagctgaaattcaagtttcctccagcagaaggagttagcatgaggactaaaatcaaggctaaattacatcagatgttgaaaaacaacatggcatcctggaatgcagttcctgcttccattaaactcatggaaatcagcaaggctgcttctgaaatgcttaccaacaactgttgtgggagacaagtagccaacagtatcataactggcaacaaaattgtgaatggaaaaagctccctggagggggcatggccatggcaggccagcatgcaatggaaaggccgtcactactgtggagcctctctgatcagcagcaggtggctattatctgcagctcactgctttgctaagaaaaataattcaaaagattggactgtcaactttggaattgtagtaaataaaccatatatgacacggaaagtccaaaacattatttttcatgaaaattatagcagtcctgggcttcatgatgatattgcccttgtgcagcttgctgaagaagtttcttttacagagtacattcgtaagatttgtcttcctgaagccaaaatgaagctctcagaaaatgacaatgttgtagttacaggttggggaacactttatatgaatggttcatttccagtgatacttcaagaagactttttgaagattattgacaacaaaatttgcaatgcctcatatgcatactctggctttgtgactgatacaatgttatgtgctggatttatgtcaggagaagctgatgcatgtcagaatgattctggtggaccactagcttaccctgattccagaaatatctggcatcttgttggaatagtaagctggggtgatggatgtggtaaaaagaataagccaggtgtctatactcgagtgacttcttatcgcaattggattacatccaagactggactctgaaaaaaaaggaattatacaaaggaacataaagaccactgtaggctatccttatctgtggctttgggatctttttattttgattgttggtaaactaatcattttattatatataaaaatataaatgtctttattaatattttattatatctaaaacactgtccatgcatttattaatcttttaaattaatgtaagagataggaagaggccaggtgtagtggctcatgcctgtaatcctagcactttgagaggccgagataggcggattgcttgagcccaggagtttgagggcagcctgggaaacatggctaaatccgtgttcaaaaaatacaaaaattagctaggcatggtggcgtgcacctatagtcccagctattcaggaggctgaggtgggaggattgcttgagcccagcaggttgaggctgtggtgatttgtgattgcgccaccactgcactccagcctgggcaacagagtgagaccctgtctcaaaaaaaaaaaaaaaaaaaggagagaagaaaataaagaaggctaatatataatttttcttaatagctgagttgtgattcattttaccattatattcagaattgaccttaatttgttttccagaatcaaaagaaaataaaatataaattttgaaactatgagaacatatataggggatttatcaaatgagttactttttattatatcaattataatttcattttattaactggaataagtgcgaaagtgtacattactttttaacttatatgtgaaatgattcatgtacctcacaaaatcatgcaatcttgcagtgaagaaggagtatcagagctccagctacactgagtctttcaatttacagatcaagaaactgaagaccagagaagagaaatgatttggttaaagtcactctccatcatctgtgataagttgacaaatttatccttacacaaatttgtcctcattgagttgacatccaaaatttgtcaggaattaaagaatgacttttgagtggcaattatttatataacattttccattgtcttcatattcaccttttgtcatttgtttgctttctcttgcagcaaaaataatatgaggtcatcaagggcagagaactgtgtggcatctccttatagtaaaagtgcaatcatatggatggctaactttgtaatctctacaaataatttaccttatgtaattttccaaatgtaaaagtcaccaaaaacttaaaggcattaaaataaactaaaaaagtactcatttcttca

SEQ ID NO: 25 - DNA, 543 bp, Artificial Sequence
  CNFN
agtgcccgtgtctccacacgtctgcctccatcactgccatcgcgatcctgcagctatgtcctaccctgtgaccagtcagccccagtgcgccaccaccagctgctaccagacccagctcagtgactggcacacaggtctcacggactgctgcaacgacatgcctgtctgtctgtgcggcacttttgctcctctgtgccttgcctgccgcatctccgacgactttggcgagtgctgctgcgcgccctacctgcccggaggcctgcactccatccgcaccggcatgcgggagcgctaccacatccagggctccgtcgggcacgactgggcggccctcaccttttgtctgccctgcgccctctgccagatggcgcgggaactgaagatccgagagtaaggaagttccctgtcttccccgtccttttccaccagtctcgcctctggccttctctggccactcctgggagggactgcctcaccacccctgtcccgctgccagaaatacacccacaataaaaacctgaaaaccaaaaaaaaaaaaaaaaa

SEQ ID NO: 26 - DNA, 2831 bp, Artificial Sequence
  ABRA
acactcattttagccagtgtccaggctatcagcagagaaagacaggtgggcagcatggctccgggcgaaaaggaaagcggggagggcccagccaagagcgccctccggaagatacgcacagccaccctggtcatcagcttggcccgaggttggcagcagtgggcgaatgagaacagcatcaggcaggcccaggagcctacaggctggctgccgggagggacccaggactcacctcaagctcctaaaccaatcacaccccctacttcacaccagaaagctcagagtgccccaaagtcgccaccccgcctgccagaaggacatggagatggacaaagctcagagaaagcccctgaggtttctcacatcaaaaagaaagaggtgtccaaaacggtggtcagcaagacttatgagagaggaggggacgtgagccacctcagccacaggtacgagagggatgctggtgtgcttgaacctgggcagccagagaatgacattgacagaatcctccacagccacggctccccaacgcggaggagaaaatgtgccaacctggtgtctgagctaaccaagggctggagagtgatggagcaggaggagcccacatggaggagtgacagcgtagacacagaggacagcggctatggaggagaggctgaggagaggcccgagcaggatggagtgcaggtggctgtggtcaggatcaagcgccccttgccctcccaggtaaacagatttacagagaaactcaactgcaaagcccaacagaaatatagcccagtgggcaacttgaaagggagatggcagcagtgggctgatgaacacatacaatcccagaagctcaatcctttcagtgaagagtttgattacgagctggccatgtccacccgcctacacaaaggagatgagggctatggccgccccaaagaaggaaccaaaactgctgaaagggccaagcgtgctgaggagcacatctacagggaaatgatggacatgtgcttcattatctgcacaatggctcgccacagacgagatggcaagatccaggttacttttggagatctctttgacagatacgttcgtatttcagataaagtagtgggcattctcatgcgtgccaggaaacatggactggtagactttgaaggagagatgctatggcaaggccgagatgaccatgttgtgattacgctactcaagtgaaccttcaaaaacaaaagccaaatttggcccactatggtcttaatgctaaatgctcatgtaggtaaaatgaaaatgcaaactctctgtaataagttagtaaatattaaacaatttttacataaacgactttctggcattctatttctatctagaatgaggaattttggagattttgagaaggcacaaagcatttcagaaagcacatagaatgttaatgtataataatagtattaatagttgaaattccacagggtgtttttgtttttgttttgagacagattctctttatgtcaccaaagctggtcttttaactcctggcctcaagtgatcctctcacctcagcctcccaagtagctgggattataggcatgagcaacagcacccagccacttgtatattttaggcaaaatatttagctagtcattgtagaaactactatagatttttaattaaacattacatctaagaagaatgctgacttgagataaatatcagtagaacatataataatgtgtctttatttggaaaaaagaaaataccattaagtttggtaaaactaaacttaaaattttttcagaagcttgactttgtattattgtttatatcatagcatcacttacaaaacaagcacatatataaaaagttgtcaagatgttgctgaaattgttgaagttcctctgtgggcttggattctaacaggtttccagtaagagttcaccttcctcttgtttgatttcagcaaatcacataaaaacagacacttcctgtcttagtaccaacaaaggaaggcacaccctcactaaaagtagagcagaggtgagagattcagatttacttgcctttgtaggacttcttggagaagtttattgtttcattacatgtcagcatataacgagtcaagctgcttgcattaacatcaatgcaatgatatgtatttctccaacaatggagaaatacagaaaatctatgaagtggaatgttcagtattagaaaaatcccatagaatcattggtgaattaaaaacagatttgagacagtttaatgttcctcatactgtaacaaagaaaactttatgaaatgtttaagtcataaaactgcaatattagttctgccaaagtaaaaaatatacaatgatgatggcaaggagaaaatcattggacattaatgtgcctatgtgatcttaaaaacaaatggaatggaatgtgagattgcaattcttactggattcaatgaaattactaaaatgcattgatagtatagcactttggtgttaaatgtaaaaattaatgtctaaatatgatacctcaaaataataggtattagactgctataagaattatatttgttttcatgtatgagtctctttcaaactgaaggttctggtatcttaagaaagtatgcgtattttgtttccataccgtatttataaagctataagttaatgaccaatatttctaagtaggatttcatgtaagatgcacacttctattacaagtgaaacctacgccaaatgttaaagacaaatagcataagaataaaagatgttttcttgtaaaaaaaaaaaaaaaaaaaaaaaaaaaaaaaaaaaaaaaaaaaaaaaaaaaaaaaaaaaaaaaaaaaaaaaaaaaaaa

SEQ ID NO: 27 - DNA, 1413 bp, Artificial Sequence
  JCHAIN
ttgtgattgtttttagtttgttagctgcctggagtgttattttaagaaagcagaagcaccatcatttgcacactccttatagatcacacaccttaaccctgactttttttgctccagtttttcagaagaagtgaagtcaagatgaagaaccatttgcttttctggggagtcctggcggtttttattaaggctgttcatgtgaaagcccaagaagatgaaaggattgttcttgttgacaacaaatgtaagtgtgcccggattacttccaggatcatccgttcttccgaagatcctaatgaggacattgtggagagaaacatccgaattattgttcctctgaacaacagggagaatatctctgatcccacctcaccattgagaaccagatttgtgtaccatttgtctgacctctgtaaaaaatgtgatcctacagaagtggagctggataatcagatagttactgctacccagagcaatatctgtgatgaagacagtgctacagagacctgctacacttatgacagaaacaagtgctacacagctgtggtcccactcgtatatggtggtgagaccaaaatggtggaaacagccttaaccccagatgcctgctatcctgactaatttaagtcattgctgactgcatagctctttttcttgagaggctctccattttgattcagaaagttagcatatttattaccaatgaatttgaaaccagggcttttttttttttttgggtgatgtaaaaccaactccctgccaccaaaataattaaaatagtcacattgttatctttattaggtaatcacttcttaattatatgttcatactctaagtatcaaaatcttccaattatcatgctcacctgaaagaggtatgctctcttaggaatacagtttctagcattaaacaaataaacaaggggagaaaataaaactcaaggactgaaaatcaggaggtgtaataaaatgttcctcgcattcccccccgcttttttttttttttttgactttgccttggagagccagagcttccgcattttctttactattctttttaaaaaaagtttcactgtgtagagaacatatatgcataaacataggtcaattatatgtctccattagaaaaataataattggaaaacatgttctagaactagttacaaaaataatttaaggtgaaatctctaatatttataaaagtagcaaaataaatgcataattaaaatatatttggacataacagacttggaagcagatgatacagacttctttttttcataatcaggttagtgtaagaaattgccatttgaaacaatccattttgtaactgaaccttatgaaatatatgtatttcatggtacgtattctctagcacagtctgagcaattaaatagattcataagcataaaaa

SEQ ID NO: 28 - DNA, 2495 bp, Artificial Sequence
  ZNF791
gcaaatgcgtgctacgtcactgtgcgatcgggttgtgcttagcttggggtctcctggccccttgacgcgtcaggttgctgtacccctgcatcggatgcgctgtaccctgcgctggctccgtgaaccttagggacaacaccgggacacccgcgaggccggaaaatggactcagtggcttttgaggatgtgtctgtgagcttcagccaggaggagtgggctctgctggctccttcacagaagaaactctacagagatgtgatgcaggaaacattcaagaacctggcatctataggggaaaaatgggaagacccgaatgttgaagatcaacacaaaaaccaaggacgaaatctaagaagccatacgggagagagactctgtgaaggtaaagaaggtagtcaatgtgcagaaaacttcagtcccaatctcagtgtgacgaagaagactgccggagtaaaaccatatgagtgtactatctgtggaaaagccttcatgcgtctctcatcccttactagacacatgaggtctcacactggatacgagctatttgagaagccatataaatgtaaggagtgtgagaaagcctttagttatctcaaatcctttcaaagacatgaaaggagtcacactggagaaaaaccctataaatgtaaacaatgtggaaaaaccttcatatatcaccagccctttcaaagacatgagcggactcacattggagaaaaaccctatgaatgtaagcaatgtggaaaagctcttagttgttccagttcgcttcgagttcatgaaaggattcacactggagaaaagccctatgaatgtaaacaatgtgggaaagccttcagttgttccagttctattcgagtacacgaaagaactcacactggagagaaaccctatgcatgtaaggaatgtgggaaagccttcatttcccacacaagtgttctaacacacatgataacacacaacggagatagaccttataaatgcaaagaatgtggaaaggcattcatttttcccagttttttacgagtacatgaaagaattcacactggagagaaaccctataaatgtaaacaatgtggtaaagccttcagatgttccacctccattcaaattcatgaaagaattcatactggagagaagccctataaatgtaaagaatgtgggaaatctttcagtgcacgcccagcctttcgagtacacgtgagagtgcatactggagagaaaccctataagtgtaaagaatgtgggaaagcctttagtagaatcagttactttcgaatacatgaaaggactcacactggagagaaaccctacgaatgtaaaaaatgtgggaaaactttcaattatcctctagatttgaaaatccacaagagaaatcacactggagaaaaaccctatgagtgtaaggaatgtgcaaaaaccttcatttctcttgagaactttcgaagacacatgatcacccacactggagacggaccttataaatgtagggactgtgggaaggtgttcatttttcctagtgcgttacgaacacatgaaagaactcacactggagagaaaccctatgaatgtaaacaatgtggaaaagcctttagttgttctagttacattcggatacataaaagaactcacactggggagaaaccttatgaatgtaaggaatgcgggaaggcctttatttatcccacaagctttcaaggacacatgagaatgcatactggagagaaaccctataaatgtaaagaatgtgggaaggcctttagtcttcacagttcctttcaaagacatacaagaattcacaattatgagaaacctcttgaatgtaagcaatgtggaaaagccttcagtgtgtccacatccttaaaaaaacatatgagaatgcacaatcgatagaaactctataaatgtgagaaataggagaaagttttcaattctaacagatgctttcaaagttgtgaaaattcccactgaagagagaaatcctgtcaatgtaagtaatatagaaagcgagatacaagatgattcatgtatagtcaggtaccacataatcatgtttcagtcagcaatggaccatataggttggtagccccataagattatataacacctaaaacatttctatcaaccgcaatttagtagcagtagtaacaccatagtgcagcacattatttaagtgtttatggtgctggtgtaaacgtgctgcactttcagttgtataaaagtacaagacagcggccggggacggtggctcacgcctgtaatcccagcactttgggaggccaaggcgggcggatcacgaggccaggagatcaagaccatcctggctaacacggtaaaaccccatctctactaaaaatacaaacaattagccgggcgtggtggtgggcgcctgtagtcccagctacttgggaggctgaggcaggagaatggcataaacccaggaggccgagctgacagtgagctgagatccggccaacagagcgagactctgtctc

SEQ ID NO: 29 - DNA, 4811 bp, Artificial Sequence
  ANO1
aaaggcgggccggctggcgtccaagttcctgaccaggcgcgggccggcccgcgggaccagcagccgggtggcggcgcgatcggccccgagaggctcaggcgccccccgcatcgagcgcgcgggccgggcgggccagggcggcgggcggagcgggaggcggccacgtccccggcgggcctgggcgcggggaggcccggccccctgcgagcgcgccgcgaacgctgcggtctccgcccgcagaggccgccggggccgtggatggggagggcgcgccgcccggcggtcccagcgcacaggcggccacgatgagggtcaacgagaagtactcgacgctcccggccgaggaccgcagcgtccacatcatcaacatctgcgccatcgaggacatcggctacctgccgtccgagggcacgctgctgaactccttatctgtggaccctgatgccgagtgcaagtatggcctgtacttcagggacggccggcgcaaggtggactacatcctggtgtaccatcacaagaggccctcgggcaaccggaccctggtcaggagggtgcagcacagcgacaccccctctggggctcgcagcgtcaagcaggaccaccccctgccgggcaagggggcgtcgctggatgcaggctcgggggagcccccgatggactaccacgaggatgacaagcgcttccgcagggaggagtacgagggcaacctcctggaggcgggcctggagctggagcgggacgaggacactaaaatccacggagtcgggtttgtgaaaatccatgccccctggaacgtgctgtgcagagaggccgagtttctgaaactgaagatgccgacgaagaagatgtaccacattaatgagacccgtggcctcctgaaaaaaatcaactctgtgctccagaaaatcacagatcccatccagcccaaagtggctgagcacaggccccagaccatgaagagactctcctatcccttctcccgggagaagcagcatctatttgacttgtctgataaggattcctttttcgacagcaaaacccggagcacgattgtctatgagatcttgaagagaacgacgtgtacaaaggccaagtacagcatgggcatcacgagcctgctggccaatggtgtgtacgcggctgcatacccactgcacgatggagactacaacggtgaaaacgtcgagttcaacgacagaaaactcctgtacgaagagtgggcacgctatggagttttctataagtaccagcccatcgacctggtcaggaagtattttggggagaagatcggcctgtacttcgcctggctgggcgtgtacacccagatgctcatccctgcctccatcgtgggaatcattgtcttcctgtacggatgcgccaccatggatgaaaacatccccagcatggagatgtgtgaccagagacacaatatcaccatgtgcccgctttgcgacaagacctgcagctactggaagatgagctcagcctgcgccacggcccgcgccagccacctcttcgacaaccccgccacggtcttcttctctgtcttcatggccctctgggctgccaccttcatggagcactggaagcggaaacagatgcgactcaactaccgctgggacctcacgggctttgaagaggaagaggaggctgtcaaggatcatcctagagctgaatacgaagccagagtcttggagaagtctctgaagaaagagtccagaaacaaagagaagcgccggcatattccagaggagtcaacaaacaaatggaagcagagggttaagacagccatggcgggggtgaaattgactgacaaagtgaagctgacatggagagatcggttcccagcctacctcactaacttggtctccatcatcttcatgattgcagtgacgtttgccatcgtcctcggcgtcatcatctacagaatctccatggccgccgccttggccatgaactcctccccctccgtgcggtccaacatccgggtcacagtcacagccaccgcagtcatcatcaacctagtggtcatcatcctcctggacgaggtgtatggctgcatagcccgatggctcaccaagatcgaggtcccaaagacggagaaaagctttgaggagaggctgatcttcaaggctttcctgctgaagtttgtgaattcctacacccccatcttttacgtggcgttcttcaaaggccggtttgttggacgcccgggcgactacgtgtacattttccgttccttccgaatggaagagtgtgcgccagggggctgcctgatggagctatgcatccagctcagcatcatcatgctggggaaacagctgatccagaacaacctgttcgagatcggcatcccgaagatgaagaagctcatccgctacctgaagctgaagcagcagagcccccctgaccacgaggagtgtgtgaagaggaaacagcggtacgaggtggattacaacctggagcccttcgcgggcctcaccccagagtacatggaaatgatcatccagtttggcttcgtcaccctgtttgtcgcctccttccccctggccccactgtttgcgctgctgaacaacatcatcgagatccgcctggacgccaaaaagtttgtcactgagctccgaaggccggtagctgtcagagccaaagacatcggaatctggtacaatatcctcagaggcattgggaagcttgctgtcatcatcaatgccttcgtgatctccttcacgtctgacttcatcccgcgcctggtgtacctctacatgtacagtaagaacgggaccatgcacggcttcgtcaaccacaccctctcctccttcaacgtcagtgacttccagaacggcacggcccccaatgaccccctggacctgggctacgaggtgcagatctgcaggtataaagactaccgagagccgccgtggtcggaaaacaagtacgacatctccaaggacttctgggccgtcctggcagcccggctggcgtttgtcatcgtcttccagaacctggtcatgttcatgagcgactttgtggactgggtcatcccggacatccccaaggacatcagccagcagatccacaaggagaaggtgctcatggtggagctgttcatgcgggaggagcaagacaagcagcagctgctggaaacctggatggagaaggagcggcagaaggacgagccgccgtgcaaccaccacaacaccaaagcctgcccagacagcctcggcagcccagcccccagccatgcctaccacgggggcgtcctgtagctatgccagcggggctgggcaggccagccgggcatcctgaccgatgggcaccctctcccagggcaggcggcttcccgctcccaccagggcccggtgggtcctgggttttctgcaaacatggaggaccactttctgataggacattttcctttcttctttctgttttctttcccttgtttttgcacaaagccattatgcagggaatattttttaatctgtagtattcaagatgaatcaaaatgatggctggtaatacggcaataaggtagcaaaggcaggtgctttgcagaaagaatgcttggaaacttgagtctccctagaggtgaaaagtgagcagaggcccgtagaaaccctcctctgaatcctcctaattccttaagatagatgcaaaatggtaagccgaggcatcgcgcaaaagctggtgcgatgcttcagggaaaatggaaaacccacgcaagaataatgattgattccggttccaaaaggtgtcacctacctgtttcagaaaagttagactttccatcgccttttccttccatcagttgagtggctgagagagaagtgcctcatccctgagccacacagggggcgtgggagcatcccagttatccctggaaagctagaaggggacagaggtgtccctgattaagcaggaaacagcacccttggcgtccccagcaggctccccactgtcagccacacacctgcccccatcacaccaagccgacctcagagttgttcatcttccttatgggacaaaaccggttgaccagaaaatgggcagagagagatgacctcggaagcatttccacagatggtgtcagggtttcaagaagtcttagggcttccaggggtcccctggaagctttagaatatttatgggtttttttttcaaatatcaattatatggtagattgaggattttttttctgtagctcaaaggtggagggagtttattagttaaccaaatatcgttgagaggaatttaaaatactgttactaccaaagatttttattaataaaggcttatattttggtaacacttctctatatttttactcacaggaatgtcactgttggacaattattttaaaagtgtataaaaccaagtctcataaatgatatgagtgatctaaatttgcagcaatgatactaaacaactctctgaaatttctcaagcaccaagagaaacatcattttagcaaaggccaggaggaaaaatagaaataaatttgtcttgaagatctcattgatgtgatgttacattccctttaatctgccaactgtggtcaaagttcataggtgtcgtacatttccattatttgctaaaatcatgcaatctgatgcttctcttttctcttgtacagtaagtagtttgaagtgggttttgtatataaatactgtattaaaaattaggcaattaccaaaaatccttttatggaaaccatttttttaaaaagtgaatgtacacaaatccacagaggactgtggctggacattcatctaaataaatttgaatatacgacacttttctcacttgaaaaa

SEQ ID NO: 30 - DNA, 3318 bp, Artificial Sequence
  TMEM144
aacctgctgtcctatgaaggcctctaggtcaccggtgctaaagccctcctttctccaccctccttaagtggaggtaaacgtcccagcaggaagtcaaggctggattggcgctcttcgcgagcaccctgggaacgggagtctgggtcacgggtgctagagccctcccctctcctcccggccggtgtatgggaaattgtccccgcagaaagtaaaggctggccaggccgcccccagcacgtagagggaatgagtcaggctccggctccacactggcacgtagtgggcggatcgcgccggcgctgagtaggaaggagcttcagccgccagcccggaacgcatcataggttagcttttcaagacacttcctgcatctctgacctgttgcacctctgttatcttggcacctctgttatcttagcagcaagcacctgcctcagctgacccttgagccataacccataagctcctgaaaagtacatcaagtctaaagtgaaccagctaactcattaagactggaatcatgagcaacaatggagcagacctaacctttggttacatctcctgttttgtagctatccttttgtttggctcaaattttgtgccacttaaaaaatttgatactggtgatggaatgtttctccagtgggttctttgtgctgccatatggttggttgccttggttgtcaatctgatattacattgtccaaagttttggccttttgcaatgcttgggggctgcatttgggcaacagggaacattgctgttgtcccaattatcaaaaccattggtttaggccttggaatcttaatctggggatcatttaatgccttaactggctgggcaagctcaaggtttggctggtttggattggatgcagaagaagtatcaaatccgctgctaaattacattggagctgggctatcagtagtaagtgctttcatatttttgttcatcaaaagtgaaataccaaataacacgtgttccatggataccactccattaataacagagcatgtgatcaacacaacccaagacccctgttcctgggtggataaactttctacagtacaccaccgcatagtgggctgcagtcttgcagtgatatctggagtactctatggatctacatttgtgccaatcatctacatcaaggaccacagcaaaagaaatgatagtatatatgcaggggcaagccaatatgatttagactatgtgtttgcgcacttcagtggcatctttcttacaagtactgtctactttctggcctactgcatagccatgaaaaatagtcctaaactatatcctgaagcagtcctaccaggattcctgtcaggagtactttgggctatagctacctgctgttggttcatagcaaatcactctctgagtgctgtggtcagttttccaataatcactgctggtccaggatttatagctgcaatgtggggtatcttcatgtttaaggaaataaagggtctacaaaactacctattaatgatacttgcattttgcatcatcttgactggagccttatgcactgctttttctaaaatctaacaatgacaaaaccagcaggtggcagcagtagttaagagaacgcgtctatcggacagcggagagatcatgctgagaaaagagtgcattttcatatagcaaatggatctcagccactgttggagtgggtaaatgatttttttccccaaaaatgtgagaatgaaggaagattgagtttcattcaagtataaaaatgaaaatttcttctgatgaactgtttatgaaggtagtactttactgggtgactaaaatgtctacattattatagcattacatacgaggatgctctttttaccacagtatgtacctagtgttgcataatctagaacacagtatagagtccatatacaaagaagttacagtccatatttctcacctattaccccagtgaagtgaggcagaaataccttgggcgaggagggagagccttaccttctaatggaattagattccaaagatatttggatcctttgtttcataaagtaaatgcatagttggtaactaaatgttaaaaaggccattttattattgttagccaaaacttctgtttatttcaagttaatatcgcccaactctacatcatctacccattttagctcataatgcttttgattatcgccagataaagtccattctcagagaacaaaaatttttcatcattgagaaaatgtgcataacataatacatacatacacaagtatattcacgtacataaatacacacagatatgttgctaaagtgagattgtaggttatcagtaacaatttaaaggaaacaaccactcttttgaatgtacaacttttttttctgaaatacacttttctaaaaccctcttaactggaggtttcctgttttcttcttgttttaactggtggtttccagtaggcaaaataaaatgacaggcatgctagttttttttttttttttttttttttaagaaaactgaaattaagccaggcagggtggcgcactactataatcccagctgctggggcggctgaagtaggagggtcacttagcccaagagtgcaaatctgccagcctaggcaacatagcaaggtcccatctctaaaaaagaaatttaatttaaatttgtaagaaaaaagaaaactgaaacagaactgccagtacaatgtttgttgcaattgtttccaaaactttgagataacgaaacccctattcaaatgtaaattttacccattcccacctgatagtactgtttattactttgctatgcaggagaaacaaaacagctttttatttgtgtgtatactctgaagtcaatgtgcatgggttaaatcccacctctgcttcattttatttgtgtggctttggacaagttcctaagccctctgtgtcaggcccctcattaacaaaatggagtttatgatggcatctacctcacatggttattgtgtggttgaaattagttcaaatctgtaaagtatgttgatgagtatctggtacttggcaaacactatataattgttagctttattattatgtgttgtttgaaggggaaaaaagtttttgtagattggagaacaccatgtaagagctactaagctcaccaccttcccatccaaacaattattactcctctaaatgaatactacttaaaagtgatggagcttctgtttgtttattgaattgctaatacaaataaatatttgactataacttcttatactcattttaattttaacctgaaatgtcattaaattatgctgataaactttgaataaattgtgatacaaaagcta

SEQ ID NO: 31 - DNA, 3721 bp, Artificial Sequence
  NEFH
aaaagggccggcgccctggtgctgccgcagtgcctcccgccccgtcccggcctcgcgcacctgctcaggccatgatgagcttcggcggcgcggacgcgctgctgggcgccccgttcgcgccgctgcatggcggcggcagcctccactacgcgctagcccgaaagggtggcgcaggcgggacgcgctccgccgctggctcctccagcggcttccactcgtggacacggacgtccgtgagctccgtgtccgcctcgcccagccgcttccgtggcgcaggcgccgcctcaagcaccgactcgctggacacgctgagcaacgggccggagggctgcatggtggcggtggccacctcacgcagtgagaaggagcagctgcaggcgctgaacgaccgcttcgccgggtacatcgacaaggtgcggcagctggaggcgcacaaccgcagcctggagggcgaggctgcggcgctgcggcagcagcaggcgggccgctccgctatgggcgagctgtacgagcgcgaggtccgcgagatgcgcggcgcggtgctgcgcctgggcgcggcgcgcggtcagctacgcctggagcaggagcacctgctcgaggacatcgcgcacgtgcgccagcgcctagacgacgaggcccggcagcgagaggaggccgaggcggcggcccgcgcgctggcgcgcttcgcgcaggaggccgaggcggcgcgcgtggacctgcagaagaaggcgcaggcgctgcaggaggagtgcggctacctgcggcgccaccaccaggaagaggtgggcgagctgctcggccagatccagggctccggcgccgcgcaggcgcagatgcaggccgagacgcgcgacgccctgaagtgcgacgtgacgtcggcgctgcgcgagattcgcgcgcagcttgaaggccacgcggtgcagagcacgctgcagtccgaggagtggttccgagtgaggctggaccgactgtcggaggcagccaaggtgaacacagacgctatgcgctcagcgcaggaggagataactgagtaccggcgtcagctgcaggccaggaccacagagctggaggcactgaaaagcaccaaggactcactggagaggcagcgctctgagctggaggaccgtcatcaggccgacattgcctcctaccaggaagccattcagcagctggacgctgagctgaggaacaccaagtgggagatggccgcccagctgcgagaataccaggacctgctcaatgtcaagatggctctggatatagagatagccgcttacagaaaactcctggaaggtgaagagtgtcggattggctttggcccaattcctttctcgcttccagaaggactccccaaaattccctctgtgtccactcacataaaggtgaaaagcgaagagaagatcaaagtggtggagaagtctgagaaagaaactgtgattgtggaggaacagacagaggagacccaagtgactgaagaagtgactgaagaagaggagaaagaggccaaagaggaggagggcaaggaggaagaagggggtgaagaagaggaggcagaagggggagaagaagaaacaaagtctcccccagcagaagaggctgcatccccagagaaggaagccaagtcaccagtaaaggaagaggcaaagtcaccggctgaggccaagtccccagagaaggaggaagcaaaatccccagccgaagtcaagtcccctgagaaggccaagtctccagcaaaggaagaggcaaagtcaccgcctgaggccaagtccccagagaaggaggaagcaaaatctccagctgaggtcaagtcccccgagaaggccaagtccccagcaaaggaagaggcaaagtcaccggctgaggccaagtctccagagaaggccaagtccccagtgaaggaagaagcaaagtcaccggctgaggccaagtccccagtgaaggaagaagcaaaatctccagctgaggtcaagtccccggaaaaggccaagtctccaacgaaggaggaagcaaagtcccctgagaaggccaagtccccagagaaggaagaggccaagtcccctgagaaggccaagtccccagtgaaggcagaagcaaagtcccctgagaaggccaagtccccagtgaaggcagaagcaaagtcccctgagaaggccaagtccccagtgaaggaagaagcaaagtcccctgagaaggccaagtccccagtgaaggaagaagcaaagtcccctgagaaggccaagtccccagtgaaggaagaagcaaagacccccgagaaggccaagtccccagtgaaggaagaagctaagtccccagagaaggccaagtccccagagaaggccaagactcttgatgtgaagtctccagaagccaagactccagcgaaggaggaagcaaggtcccctgcagacaaattccctgaaaaggccaaaagccctgtcaaggaggaggtcaagtccccagagaaggcgaaatctcccctgaaggaggatgccaaggcccctgagaaggagatcccaaaaaaggaagaggtgaagtccccagtgaaggaggaggagaagccccaggaggtgaaagtcaaagagcccccaaagaaggcagaggaagagaaagcccctgccacaccaaaaacagaggagaagaaggacagcaagaaagaggaggcacccaagaaggaggctccaaagcccaaggtggaggagaagaaggaacctgctgtcgaaaagcccaaagaatccaaagttgaagccaagaaggaagaggctgaagataagaaaaaagtccccaccccagagaaggaggctcctgccaaggtggaggtgaaggaagacgctaaacccaaagaaaagacagaggtagccaagaaggaaccagatgatgccaaggccaaggaacccagcaaaccagcagagaagaaggaggcagcaccggagaaaaaagacaccaaggaggagaaggccaagaagcctgaggagaaacccaagacagaggccaaagccaaggaagatgacaagaccctctcaaaagagcctagcaagcctaaggcagaaaaggctgaaaaatcctccagcacagaccaaaaagacagcaagcctccagagaaggccacagaagacaaggccgccaaggggaagtaaggcagggagaaaggaacatccggaacagccaaagaaactcagaagagtcccggagctcaaggatcagagtaacacaattttcactttttctgtctttatgtaagaagaaactgcttagatgacggggcctccttcttcaaacaggaatttctgttagcaatatgttagcaagagagggcactcccaggcccctgcccccaggccctccccaggcgatggacaattatgatagcttatgtagctgaatgtgatacatgccgaatgccacacgtaaacacttgactataaaaactgcccccctcctttccaaataagtgcatttattgcctctatgtgcaactgacagatgaccgcaataatgaatgagcagttagaaatacattatgcttgagatgtcttaacctattcccaaatgccttctgttttccaaaggagtggtcaagcccttgcccagagctctctattctggaagagcggtccaggtggggccggggactggccactgaattatgccagggcgcactttccactggagttcactttcaattgcttctgtgcaataaaaccaagtgcttataaaatgaaaa

SEQ ID NO: 32 - DNA, 3471 bp, Artificial Sequence
  VXN
tttttggtggaaattctccagccaagcttggcgctaacagagtaggcgatttcacttcgtcgtcacctcacaaaaggcttccaaattcactgcggcagacaccgcaaaataaaaatgttaaatacatcctagctgggaggggattgaagcctccaggctcaatcaaaggtttgcaataataggattcatttaaaaaaaaaaaaaaaaaaaaggacagatgggtttagaaaatgttgcagtgaagactggaacgagatgagctcatagcaccagcctgtcttttgtggacccgcacaatgatccctgagccagactggattaggatgcctcgcgactaggggtccagagacagaggcctccagttcccaggcacttcgggaagaggaggctgaaatgatgcatcagatttacagctgcagtgacgagaacatagaagttttcaccaccgtgattccttccaaggtatccagtccagccagaagaagagccaaaagctctcagcacctcttgaccaagaatgtggtgatcgagtcggacctgtacacgcaccagcccctggagctgctgccccaccgcggagaccgcagggaccctggcgaccgccgcaggtttgggcggctccagaccgcgcggccgcccacagcccacccggccaaagcctctgccagacccgtggggatttctgaacccaaaacatcaaatctgtgtgggaatcgagcatatggaaaatctctgataccgccagtgccccggatctcagtgaaaacttcagcctctgcctcattggaggcgacagccatgggcacagagaagggagctgttctgatgagaggatccagacatctcaagaagatgactgaagagtatccagcccttccccaaggagcagaagcctctctaccactgacaggcagtgcttcctgcggcgtccccggcatcctccggaaaatgtggacaaggcacaagaagaagtctgaatatgtgggagccaccaacagcgcctttgaggccgactaaaggtgaccctcttcaagtgccctgtgttggccaaggttccccggacaagaggaaaaaccttcaggattgaaactgagccacacgcacctctgctagtagctggtccaaacccattatcctccctcactcattgattaccctgggatagggcacaggaaagaaatgtccctcgaaggcaatataaaactgccccttcttagaattgctaaagccattggtctgaaagtgactttgggaggtcataaagtttgtatctctatctttaagcaaaaaattaaactttcccagctcattttaaagacctccaaggaaggaaaaaagcaattcctctgtcttccttgtgagttgctctaaagtgtgtgattttctagtgtaaatggactttgaggcacttgtaaacacaatggttcttactgtttccattactgcatttacttcaccttgacaaggtacaattttcaaggacaaagcactatatataaagttagtagttctaatatccacttgagagtatactcaagattgattttcatggccatttggcatgattgcatgaattctctattcttttatgtgcagtttttctatagaaaaacattaaaagttaaatgttgactgctaatgttttctgaagtggcatagtctagtggaatcaataatcccttgctttggtataataatttgaacttttgaaagtgctttctcatccgttatctcttatcttcacaaaacccctgtggaagaaagcacaattattcccaatctgcagagggggaaatggaggccttcagagattacaggaccagataccaggtagtggaaccagacagcaggtccttaacttctctccagtggactccctgctttgcctactctctagcaactgacttggggaagtttttaaatggtgagagtgtgtctctgggggcaaccattgaaaagaagactctgatatgttggaacaagtaagggatttgaatgaaatacactattatatcttatatgttagcttgaaccagaaaaagttgacatttttgtaggtcaaaaacaattgagcatcaatttcatatggttcaacctcatatatgatactatgcttttcttctatcagtgaaaatgtcatcatcaattccattgtcaacattagtagccttaaaacaataacataataataatgatgataatgatacttatagctatcatctattaaatgcctatgtttcaggcatgatactaggcaatttatatatatcatcctaatctttctaaaaactctattaggtggccctatccacttaatagatgccaattcaaagaggttaaatgattagactaaggcacctaacttatgtgagtgtcaggcttcaatgcctgtgttagagctactccttcacacaaaatagttcagaacatagagaaggaccaaggttaataaatgattttcatcccaaacactaaacatgattgatgggtagaggctgcccgaagtactgtgtaaagatggaatctgagatagaagaatgctgtggtcaattagtaattcttgcccatggagggattagtgacacatgccttgtatatttgtcatctgtggcctaaactctgcccctgaaggtttgttttctaattcagaggtttaaattaatctagcccacttaataaaaccagagatcctatgggaaatttagcctaagacagtgctggaaattgccatatgttgatacaaagaagtgtttggccacattacaggtctcagactcaactgctatgtgtgactgccgctctgtgcctatgtcttgcttttttgctgagttccctatttccatatctccaggtgaatccatgagaagcgagagggtggctgagaggcctgggcctctgggattccaccttgctatctctgctcttcaaccattgttttagactctgaacaccagatcctcatatctgaaagtgatttggagacctgggcatcaagtgctcttttaagaaggggctatcccagaggactgttcaaaagtctcattcaatagagatgttggagtccagaacaaagttagggagcaaaccagtaacctatgctggtcgtaacagaggatcctacaattacgtttgtttttaagacaggattttgctgtgttgcccagactggtctcaaactcctgggttcaagagatccatcctcccacctcagtctcctgaaagctgggatgacaggcacatgccaccacacctagctccttacaaccatttattttaacttatttcatttataactggtatctttcatttgtatgtggcagctagagatttatataggatggaagtaatttatttttaatttaaatatttcatgttgaactgtttgccttgtatggaacattttacttggccaattcaaataaaaataaagtcagctttgtttgtgacattcatgcaccaccataaaaaaaa

SEQ ID NO: 33 - DNA, 699 bp, Artificial Sequence
  CRCT1
gcccattccagttggagaacgtagtgagtctttcagtggagccagggtctggtttgtcgtgaggagctccgcgatgtcctctcaacagagcgccgtttccgccaaaggcttttccaaggggtcgtcccagggccccgctccgtgtcccgccccggcgcccaccccggcgcccgcctcctcctcctcctgctgcggctccggcaggggctgctgcggcgactcaggctgctgcggctccagctccaccagttgctgctgcttcccaaggagacgccgccgacagcggagtagtggttgctgctgctgcgggggcggcagccagaggtcccagcgctccaacaaccggagctcaggatgctgctccggctgctgagaggcccgcaacccccagcgctgcgctagagaaacccgcccagcccagagcgggcccgccccgctgcggctcccacgcggggctgggcctcggagtttgccccgtaaagcgaattgcactttgatgttcagaaacccactttgttctcagccacgcaaaactccctgaccccgatgtgatttttctccccggggattcgagagccatgcgtgggacactggaccctactgtctacacgggcttgcacacagcaggtgctcagcaaatgtctattgatttgattgtcttttgaagatgtcataataaagcttctacctcctgaaaaa

SEQ ID NO: 34 - DNA, 1500 bp, Artificial Sequence
  MIR155HG
gccgagcccgggcccagcgccgcctgcagcctcgggaagggagcggatagcggagccccgagccgcccgcagagcaagcgcggggaaccaaggagacgctcctggcactgcagataacttgtctgcatttcaagaacaacctaccagagaccttacctgtcaccttggctctcccacccaatggagatggctctaatggtggcacaaaccaggaaggggaaatctgtggtttaaattctttatgcctcatcctctgagtgctgaaggcttgctgtaggctgtatgctgttaatgctaatcgtgataggggtttttgcctccaactgactcctacatattagcattaacagtgtatgatgcctgttactagcattcacatggaacaaattgctgccgtgggaggatgacaaagaagcatgagtcaccctgctggataaacttagacttcaggctttatcatttttcaatctgttaatcataatctggtcactgggatgttcaaccttaaactaagttttgaaagtaaggttatttaaaagatttatcagtagtatcctaaatgcaaacattttcatttaaatgtcaagcccatgtttgtttttatcattaacagaaaatatattcatgtcattcttaattgcaggttttggcttgttcattataatgttcataaacacctttgattcaactgttagaaatgtgggctaaacacaaatttctataatatttttgtagttaaaaattagaaggactactaacctccagttatatcatggattgtctggcaacgttttttaaaagatttagaaactggtactttcccccaggtaacgattttctgttcaggcaacttcagtttaaaattaatacttttatttgactcttaaagggaaactgaaaggctatgaagctgaatttttttaatgaaatatttttaacagttagcagggtaaataacatctgacagctaatgagatattttttccatacaagataaaaagatttaatcaaaaaatttcatatttgaaatgaagtcccaaatctaggttcaagttcaatagcttagccacataatacggttgtgcgagcagagaatctacctttccacttctaagcctgtttcttcctccatatggggataatactttacaaggttgttgtgaggcttagatgagatagagaattattccataagataatcaagtgctacattaatgttatagttagattaatccaagaactagtcaccctactttattagagaagagaaaagctaatgatttgatttgcagaatatttaaggtttggatttctatgcagtttttctaaataaccatcacttacaaatatgtaaccaaacgtaattgttagtatatttaatgtaaacttgttttaacaactcttctcaacattttgtccaggttattcactgtaaccaaataaatctcatgagtctttagttgatttaaaataaaaaaaaaaaaaaaaaaaaaaaaaaaa

SEQ ID NO: 35 - DNA, 3488 bp, Artificial Sequence
  CREG2
actagcgctgctggcggccccggcggccgggcgtgctgcctgcaagatgtccgtgcgccgcggccggcggccggcgcggccggggacccgcctctcctggctgctgtgctgcagcgccctgctgtccccggccgcgggctacgtgatcgtgagctccgtgtcttgggccgtcaccaacgaggtggacgaggagctggacagcgcctccactgaggaggctatgcccgcgctgctagaggattcgggcagcatctggcagcaaagcttccccgcctctgcccacaaggaggacgcgcacctgcggccccgggcgggcgccgcccgggccaggccgccccccgcgccacccgggatgttctcctaccggcgcgagggcggccagacggccagtgcgcccccgggccctagactgcgcgccgccaccgcccgctccctggcccatgccagcgtctggggctgcctggccaccgtgtccacccacaagaagatccaaggactgccatttgggaactgcctgcccgtcagtgatggccccttcaacaatagcactgggattcctttcttctacatgacagccaaggaccccgtggtggctgatctgatgaagaaccccatggcctcgctgatgctgccagaatcagaaggggagttctgcagaaaaaacatcgttgatccggaagatccccgatgtgtccagttaacgctcactggccagatgatcgcagtgtctccagaagaagtagaatttgccaagcaagccatgttttcaaggcacccagggatgaggaagtggcctcgtcaatatgaatggttctttatgaagatgaggatagaacatatctggcttcagaaatggtatggaggcgcatccagtatttcaagggaggaatatttcaaagcagttcccagaaaggcctgatggagtgagaagaaagtccttggtgtttgcacttaaatgaaaaccttttcagtgatgcagccagacagctattgaccactgtctctttgttgaagggttcatagcagccctgccatccctgcagcagaatgagagagggtgaacagggaactctatgctagatttgagattaaagtggtcatttgcagatctccaactcacacagatacttcacgtagatagtctttattccattgtattcaatccagactcatcgattcagaaatcatataatagctggtggtcaaaatgacatgttgagatcattgttgtttcattgtttaaggaaaaaaaaaaatgcctgtacctacaatgtgattgctttgtattgtgagagtatctttgttgcttgctctgccaaatgcagtcttggttctaagttcactgtgaccacgaagcagctgactgtgcatcacgcagtcacaatattgtttttagggtgagggtggaggactgtgtgtccgtggattactcctcctgctggtggattgcagatgcattattaggtcatactggctagaatgcagcttttctcccaccataacatgaaaacagtgtaagaacatagggtgctttgtgcatagcccttctctatgtaagcagccatggcagtcattaaagagaaaggagtagctttgacattaagctccccagatccctgctgctcatacttctggcaagggttcccctctctcatgcatgaacaggggcatccaaaataagaagctctccattctgtggtggggaaagcggagaggggagtgggtgaagctgggaaagtaaaggcagcacgttacagaaggaagaaaggaagccagtaactgagggcccactgcctgcccggccctgggccaggccctcaacagaagccatctcatttaagccctgcaaccaatgagatgcacgtcatcattggctcttacagacaagaaaactagactcagaggggctgagtccacatcccagacagctcactgcagacacaggtggagtggttcctacaagacatccagttttaacaacaaaagagttattgaaatgcatgggtagaaattgaaccaggaaaatcagtaaagtgattgtaaaaaagaaggactagcttgcctggagatgatgtttcttgcttttggaaaaaaaaaaaaagtctctgaaatttgattcttactacagatttaaaactttctacatattatatgtaggagctcctagtgtttttgagaaattagactgtacctgtgtacacttctaaggtctacatggacctatgtatatatatctaagacctctgatcattaaaacctataaagggttgagctgtcccaagttttctgtctttctgtaatggctacaaactttctttggtaggttagggaggttgtataacataaaaaacacatcactatatgtaggaaatatacatttttcaagtaaataagagtgttattaatgattatgaacttttgcttaacaaaataacatacgacgagagcttgagttgtcaaaatatattttaattatctattgctaaaaacatagtaagatgcagagaattctttatttgtcataagccagtcctcaaaagagttcctaacagtagtgatttctaatatataagaataaggtacttctgagggaattttatattttcagagtttaaaattattgctactcccaatttagaaaaatggggagaaagctggaagaacaaatgacatgctcaaatgtattgcataagtcaacctcacaccttaatactgggagcttctctgcctcctgatcctgtcttgcagataaggtcccctggctaggtttgcgtttatagtcaggttccatttagctcattaaaggtcactgctgcttcaaaggactttgcccagtggatgccattcataaccactgatgaatgttatcagctatttatccaaattacaggaaatgaaacctgaaaaggttgggtaagaatagtgttgaaaattcacagttttaagtttgatggtctccattcaggcaagtgtgtttcagcaaatctctagaaatttacattgattaaaatgttagaggctgttctggaagttctagacatggcaataaggcaagaaaaagagattaaatgcatacagatcgaaagaaaaaaaaagtacccctatttagagatgagaggattgcctacatagaaattccaaataatctattttttttaaaaaaaaactctggaactagtatgtgagtgcaacaaggtctcaggacacaagatcagcatacaaaagtcaattgcatttctctatgctaacgatgaacatgtggggaaaaaaactaaaaacacaataccatttgcaatcactccaaagtgaaatacttccgtataaacaaaacttacccaggacctatgtagtgaaaatttttaaatgctaagaaaagaaattaatgacctaaacaaagaaagagagataccatgttcttggattggaagatacaaacagtaaagatatcagttctccccatctccatctctaggtttaatgcaattcct

SEQ ID NO: 36 - DNA, 2019 bp, Artificial Sequence
  TUBB2B
gggggctcgggctgggggcgcggcctgtgccggccgccccaccctccttgcataaaagccggagcccgcggggccggcgctctcagcccgtcggttcccgagcgccttcccggtgaccccgcagtgggtgtgtgaggggaggacggacagacccagacgccgccggaccaggaggacgctgacgaggcaccatgcgtgagatcgtgcacatccaggcgggccagtgcggcaaccagatcggcgccaagttttgggaggtcatcagtgatgagcatgggattgaccccactggcagttaccatggagacagtgatttgcagctggagagaatcaatgtttactacaatgaagccactggtaacaaatatgttcctcgggccatcctcgtggatctggagccaggcacgatggattcggttaggtctggaccattcggccagatcttcagaccagacaatttcgtgtttggccagagtggagccgggaataactgggccaagggccactacacagagggagccgagctggtcgactcggtcctggatgtggtgaggaaggagtcagagagctgtgactgtctccagggcttccagctgacccactctctggggggcggcacggggtccgggatgggcaccctgctcatcagcaagatccgggaagagtacccagaccgcatcatgaacaccttcagcgtcatgccctcacccaaggtgtcagacacggtggtggagccctacaacgccaccctctcggtccaccagctggtggaaaacacagatgaaacctactgcattgacaacgaggccctgtatgacatctgcttccgcaccctgaagctgaccacccccacctacggggacctcaaccacctggtgtcggccaccatgagcggggtcaccacctgcctgcgcttcccgggccagctgaacgcagacctgcgcaagctggcggtgaacatggtgcccttccctcgcctgcacttcttcatgcccggcttcgcgcccctgaccagccggggcagccagcagtaccgggcgctcacggtgcccgagctcacccagcagatgttcgactccaagaacatgatggccgcctgcgacccgcgccacggccgctacctgacggtggctgccatcttccggggccgcatgtccatgaaggaggtggacgagcagatgctcaacgtgcagaacaagaacagcagctacttcgtggagtggatccccaacaacgtgaagacggccgtgtgcgacatcccgccccgcggcctgaagatgtcggccaccttcatcggcaacagcacggccatccaggagctgttcaagcgcatctccgagcagttcacggccatgttccggcgcaaggccttcctgcactggtacacgggcgagggcatggacgagatggagttcaccgaggccgagagcaacatgaacgacctggtgtccgagtaccagcagtaccaggacgccacggccgacgaacaaggggagttcgaggaggaggagggcgaggacgaggcgtagatgcccccgcgagacgggttagggaaagcggaggaggaaagcgagggggtggggggcttcccgggacgataacctggcagtggaaggaaagaagcatggtctactttaggtgtgcgctgggtctctggtgctcttcactgttgcctgtcactttttttttccttttttgtaatattgatgacatcaatgtaacatttgagatatttctgaattactgttgtaatggctaaaatcacataaacgtttgtgtcggaatggtgtcctctctttctcttcctttttctctttattaacgatttaaatgtaactttctgaacacattgcattgaattcttcctttaacaaaaagcaaaggcgtaggtaaaagctcaaatgaatttattctttcggtatggtaaaattgaaccaatcacagttaagatgagagatcaacctgagttttaaaatacctttaataaatattagttgaaaaaatgtctacttgaaagca

SEQ ID NO: 37 - DNA, 3938 bp, Artificial Sequence
  SLC17A6
cgtttaaaagccatcagatttgagagcaataagtcttcaaaaccgggaatttacattgtttttcagctgaccgacttccaggaaaaggactcaaccgcatctacccaaataccgtggcactgcttgcgctctttgccaccggatcctccccttccaatgagactttctgattgtgtctaccaactctcctattaggaaacccgtgggttgcatgcagctattctgttgtattctcattctcactctccctcccttctctcactctcactcttgctggaggcgagccactaccattctgctgagaaggaaaagcccgcaactactttaagagattaagacaatatgcgcaatcctcgcctttcctagcaatcactatttaaatctggcaagaactgacaacagtctttgcaagaatggaatccgtaaaacaaaggattttggccccaggaaaagaggggctaaagaattttgctggaaaatcactcggccagatctacagggtgctggagaagaagcaagacaccggggagacaatcgagctgacggaggatgggaagcccctagaggtgcccgagaggaaggcgccgctgtgcgactgcacgtgcttcggcctgccccgccgctacattatcgccatcatgagcggcctgggcttctgcatctccttcggtatccgctgcaacctgggcgtggccattgtggacatggtcaacaacagcaccatccaccgcgggggcaaggtcatcaaggagaaagccaaattcaactgggacccggaaaccgtggggatgatccacggttccttcttttggggctacatcatcactcagattccgggaggctacatcgcgtctcggctggcagccaacagggttttcggagctgccatacttcttacctctaccctaaatatgctaattccatcagcagccagagtgcattatggatgtgtcatctttgtcagaatactgcagggacttgttgagggtgtgacctacccagcatgtcatgggatatggagcaaatgggccccacctctagagaggagtagactggcaaccacctccttttgtggttcctatgccggagctgtgattgcaatgcctttagctggcattcttgtgcagtacactggctggtcttcagtgttttatgtctacggaagctttggaatggtctggtacatgttttggcttttggtgtcttatgaaagtcctgcaaagcatcctactattacagatgaagaacgtaggtacatagaagaaagcattggagagagtgcaaatcttttaggtgcaatggaaaaattcaagactccatggaggaagttttttacatccatgccagtctatgcaataattgttgcaaacttctgcagaagctggactttttatttattgcttattagtcagccagcatattttgaggaagtctttggatttgaaattagcaaggttggtatgctatctgctgtgccacacttagtaatgacaattattgtgcctattgggggacaaattgcagattttctaagaagcaagcagattctttcaactacgacagtgagaaagatcatgaattgtggtggttttggcatggaagccacactgctcctggtcgttggctattctcatactagaggggtagcaatctcattcttggtacttgcagtgggattcagtggatttgctatatctggtttcaatgttaaccacttggatatcgctccaagatatgccagtatcttaatgggcatttcgaatggtgttggcacattgtcaggaatggtttgtcctatcattgttggtgcaatgacaaagaataagtcacgtgaagagtggcagtatgtcttcctgatcgctgccctagtccactatggtggagttatattttatgcaatatttgcctcaggagagaaacaaccctgggcagacccggaggaaacaagtgaagaaaaatgtggatttattcatgaagatgaactcgatgaagaaacaggggacattactcaaaattatataaattatggtaccaccaagtcttatggtgccacaacacaggccaatggaggttggcctagtggttgggaaaagaaagaggaatttgtacaaggagaagtacaagactcacatagctataaggaccgagttgattattcataacaaaactaattactggatttatttttagtgtttgtgattaaattcattgtgattgcacaaaaattttaaaaacacgtgatgtaaacttgcaagcatatcaaccaggcaagtcttgctgtaaaaatgaaaacaaaacaaacccatgaggttaccatcaagtgcaatctgtaaaattgtgaagttccatcatttccattcaagtcatccattcttgcatttgtgacttaaaggttgactggtcaaaattgtagaaacaagtagttacccattggattcatatgagctaaaactcatcactatttactaaagcacaacatctcatcctacaaaagttaagaagccaaagctacttgatcatgcaaaatgcacttatatatttgttacactgtattgcaagatagcacacagaagttggctgcgtcaagtagaggcgacatttattaagtgaaaatcatggagttgggatatctctcaattaaagaaatacattgtgaactatcagctacaaagttgtactgaataactattagaattgcataatgtgagatattttgttagtcctcaaaaggaatatcttgcagtgttttctatgaaatgcttgggcacaaacacttatttctgtgaaagagaacatgtaagttgaggggtatgcttcatgttcttccatccatttacctaatagtatgaaacagttcacatttcaataaaatcaaacttttcatgtagcgtatcacataacttttttgcaaaaaatataaaaagaaataaacttcaatgtattttttattacaactttgtactggttgtaacttgcattagaaaaaaaagagatatatacaccacaaagaatctaataagaaatttattatggagatatagcccttaaaatgcaatattaagaacaaagaaatagaaaatggtttagatatctttcttccttcataattaaatactatatgaaacttgtgccacagagctatatataatatgaaaagattaacttcatagagatattgtaagtaggtaattttattatttaaagtcctattaagaaatatttgtcttaaatatataggacaatacattatattaaaatggtctctctctatatatatctgtatatcttatacatgtccatacacagaaacataataaacaatcttcacacgaaaccaaaaatagcatacacctaatgttgggttagggaattgcaatttctactttcatagagtcatagaattttaggtggggaagaggcattttgcttgtcatttcttaatataactcaacaagaattgcaacatttgtgtaccaagcaataagtgcaatgcataaaatttcctgtctgtatattaccttcattttgcttgtagtagctgtttgggtggttggaataattttatttttcttttaaaaaagctaacatcagacccctttataatgtcctaaaattatgataatacatttcccaattcaactcaaaatattattggtgtattttgtctattctggatatttgatctgttcaatgtactgtgctagtgactggaggccctgctactgcaaatataaaacataaagtttgtttaaaaaaatgcaaatcattctttaccttaagaaaaaaaaaataccctttgctttgtgcctcaaagtgatgtaatgtgatcacagcttttgttgtgttgaatgaaaatatgtggactgtcattttgttgcagcaaaaaagtgttaataaaatgctctatttatcctttttttaaaaaaaaaaaaaaaaaa

SEQ ID NO: 38 - DNA, 4319 bp, Artificial Sequence
  PERP
ctctgagtcaccggaatctaggtggggccgcccggagcggcgtcctcgggagccgcctccccgcggcctcttcgcttttgtggcggcgcccgcgctcgcaggccactctctgctgtcgcccgtcccgcgcgctcctccgacccgctccgctccgctccgctcggccccgcgccgcccgtcaacatgatccgctgcggcctggcctgcgagcgctgccgctggatcctgcccctgctcctactcagcgccatcgccttcgacatcatcgcgctggccggccgcggctggttgcagtctagcgaccacggccagacgtcctcgctgtggtggaaatgctcccaagagggcggcggcagcgggtcctacgaggagggctgtcagagcctcatggagtacgcgtggggtagagcagcggctgccatgctcttctgtggcttcatcatcctggtgatctgtttcatcctctccttcttcgccctctgtggaccccagatgcttgtcttcctgagagtgattggaggtctccttgccttggctgctgtgttccagatcatctccctggtaatttaccccgtgaagtacacccagaccttcacccttcatgccaaccctgctgtcacttacatctataactgggcctacggctttgggtgggcagccacgattatcctgattggctgtgccttcttcttctgctgcctccccaactacgaagatgaccttctgggcaatgccaagcccaggtacttctacacatctgcctaacttgggaatgaatgtgggagaaaatcgctgctgctgagatggactccagaagaagaaactgtttctccaggcgactttgaacccattttttggcagtgttcatattattaaactagtcaaaaatgctaaaataatttgggagaaaatattttttaagtagtgttatagtttcatgtttatcttttattatgttttgtgaagttgtgtcttttcactaattacctatactatgccaatatttccttatatctatccataacatttatactacatttgtaagagaatatgcacgtgaaacttaacactttataaggtaaaaatgaggtttccaagatttaataatctgatcaagttcttgttatttccaaatagaatggactcggtctgttaagggctaaggagaagaggaagataaggttaaaagttgttaatgaccaaacattctaaaagaaatgcaaaaaaaaagtttattttcaagccttcgaactatttaaggaaagcaaaatcatttcctaaatgcatatcatttgtgagaatttctcattaatatcctgaatcattcattttagctaaggcttcatgttgactcgatatgtcatctaggaaagtactatttcatggtccaaacctgttgccatagttggtaaggctttcctttaagtgtgaaatatttagatgaaattttctcttttaaagttctttatagggttagggtgtgggaaaatgctatattaataaatctgtagtgttttgtgtttatatgttcagaaccagagtagactggattgaaagatggactgggtctaatttatcatgactgatagatctggttaagttgtgtagtaaagcattaggagggtcattcttgtcacaaaagtgccactaaaacagcctcaggagaataaatgacttgcttttctaaatctcaggtttatctgggctctatcatatagacaggcttctgatagtttgcaactgtaagcagaaacctacatatagttaaaatcctggtctttcttggtaaacagattttaaatgtctgatataaaacatgccacaggagaattcggggatttgagtttctctgaatagcatatatatgatgcatcggataggtcattatgattttttaccatttcgacttacataatgaaaaccaattcattttaaatatcagattattattttgtaagttgtggaaaaagctaattgtagttttcattatgaagttttcccaataaaccaggtattctaaacttgtttccagtttgtagtttttccatttttcaaatctggggaaaggaattaaaaaaaaaatgggtaataagaacatgggatataatgaaaagtggtttttgtttgtttttttgtttgaagttttaagggccttgctcattttaggtgtccaaaaccaatttttgagtggagattaatgaattctaatagtctattccctgaacttttcctcaatgaacaataccctagacacacattaaacaatttctctgcagtgctatcaaccagaggaaaatggactaagagatttctggcaggttcagacacccgggggacatgtgtgcagtgtagctgaagcctcctccttgtgctggggtccccttccattcaggtggtggggtagcagtctctctattttccccttgccctccttcccattttatcatttgttattttttttcccaccataagtcatatgttacttccactatggtgtatgtcattgtgaggatgggtgcagagaggctgggtgggagaacggaaatatatctccctagggctactgttggccagctagtccttggcagtgaatttttctatgcttttcaaaatgcgaggtgaatgtttctcatagagaaatgtaatctgggtgattataccaaaattgaaaagaaaaacccacacaactatgccgtggctggtggagaatttgaagtggtcattaaaaatgttaaaaatcccatcttttaaagtgataccacagctcattcaagaagatactggatatctagagattaagaaacgtggtctcctgttaaacatgaaaatgactccgtttataagcttctctaccacatgcacttgtctttgcatgatttcccatccagccttcttcccctcctcaatcacacaataccttaacggcgcacatttaggaaaaatgcaacctcctgggaccaacgagcctgatataatagaaccatgtcaacctaaagtatttatgacaaagataaactcttattttgcagaaatggtctgcttccttcagccttgttctagtatagagatctgccattccttgttgatccagattcaccaagacagatacctttatgtcataacagaagggaagttccagaggattctggagagtaatgaagaattgggctgagaaaccacctgaaggctaacagtgcattgcatgagatttcccacagtaaagctgaggtgctttttggttcagtaattaaatattgagttcccaccctttaaataagcagttctaggttcctaagcaattatttcactctgtaagtagccagacatgctaagtggcacttactgctgattgtaacaaagaagtaatatatcaaggtctttccatgttcacacaaggtagcttgtgtgtaataacttagcttcaaaaccatagactgcagaactcacaagttcaacagcctttccttttttaaggaaatgaaaacaatggaaaatatagtcatcataacttaattcggtttattttttttttctgtaaactccccctgaaagacattcctattaatacagtaaatgtgaacactgacttgtttttataagcacatctgaaagggcatatttgagtctcatcccaactttggtccttgctatctgtgcaggcttgggcaggtcatctccctgctggtctcaatatcctcacctgtaaaatgattgtaaatgatccccctaccttcaagattctctgattgatagaattttttctttaattaaaaaattttaaatattccttgagttggaagcactgatcaataagtggattgcttagggaggttggaacgaatagattcagtcccaacttcctcttttaaattccctcttcctcactcttcctgcaacacttatttttacagttgagttttaaaaataagtaatatataaaataatttctgtagtgtggtttcagatttaaaaattcctgcagacaggctgggcttgcaaccccatcagtcgatggtcagagccctttgctttttgagaccatttttaggtgagcttggcttgcctggatacagtgtgcagtgcattcttcctgaattttgcaattctggtatctgggtgtattttctaggtgtgtcagggtgagtgtaatccacctagggtgtggaaaaagccaagaaagggaaattaaaagaggttcctatccagtcatgttaatgatcttccacttgtactatcctgtgcttcgttgttaacctcgaaaacatactttgttggctgcaaaaataaacaaagggaaactcaaaaaaaaaaaaaaaaaa

SEQ ID NO: 39 - DNA, 4685 bp, Artificial Sequence
  TXLNB
acgtgtgtatgtgtgtgtgtgtgtattgggtttctctctcccttgtaagaacacagccagcccgccctctcctgctgttgctgcagctctgacttgctttttcctgcctccttcctctcctctctcttcttgcttagcttcttgccttctgatactactcccaagatggaggctaatcactctgaacagctctcagcggaacgacagtcaacacctccaggtgacagttcatcattacccagtcacaatggcctggagaaggaagatggccaggattctccaaccccagtccaaccaccagagaaagaggcaagtgtgcaccccgatatctctgaagagctgaatcgacagctggaagacatcattaacacttatgggtctgctgccagcacagcagggaaagagggctctgccagggccagtgagcagcctgagaatgcagaatcacctgacaacgaggatggggactgtgaggaaacaactgaagaggctggaagagaacccgttgcttctggagagccacccactgtcaaagagcccgtcagcaataaggagcaaaaattggaaaagaaaatcctaaaaggattaggcaaagaagccaacctgctaatgcaaaatctgaacaagttgcaaacaccggaagaaaagtttgattttttattcaagaagtatgctgaattgctggatgaacatcgtactgagcaaaagaagttaaagctcctccaaaagaaacaggtacaaattcaaaaagaaaaggaccagttacaaggtgaacacagcagagctatcctcgctcgaagcaaattggagagtctgtgccgggagctgcagagacacaacaagactctgaaggaagaggcgcttcagcgggcacgtgaggaagaagagaaaaggaaggaaatcacaagccatttccagagtaccctcacggacatccagggccagatcgagcagcagagtgagcgaaatatgaagctctgtcaggagaacacagagcttgcagaaaagctgaaaagcatcatcgatcagtatgagctcagagaggagcatctggacaaaatatttaaacacagagaactgcagcagaagctggtggatgcaaagcttgagcaggcccaagaaatgatgaaggaagcggaggagcgacacaaacgagaaaaggaatatttgctgaaccaggcagcagagtggaaacttcaggcgaaagtgctgaaggagcaagagacagtcctgcaggctcagctcactctctactcaggaaggtttgaagaattccagagcacactaactaaaagcaacgaggtgtttgccacgttcaaacaggaaatggacaaaacaactaagaaaatgaagaagctggaaaaggacacagccacatggaaagcccgatttgagaactgtaacaaagctctgttggacatgattgaagagaaagcactgagagctaaagaatatgagtgctttgtgatgaaaatcgggaggctagagaacctctgccgtgctttacaagaagagagaaacgaactccacaaaaaaatcagagacgcagaaatatctgaaaaggatgaccaaagtcagcacaactccgatgaagagccagagtcaaacgtctctgtggatcaagagattgacgcagaggaggttaatagtgtccaaaccgccgtgaaaaatctggccacagccttcatgataattcatcatccagagtcaaccccgcaccagtccaaagaaacccaacccgaaataggcagttctcaggagagtgctgacgccgctctcaaggagccagagcaaccccctctgatcccttcacgggattcagagagtcccctgcctcccctaactcctcaggctgaagccgaaggaggcagtgatgctgaacctccctccaaggccagtaattctcctgccgggttgggagcagaaacccaatgcgagggtctccctgttggagcacaggctgatcaggcgtcctggaagccagaggcagaagcttccggtcaggccccacaggctcccaccgaggcctccctacagaagatggaggcagatgtgcctgctccagcatgcgcagcagaagagcacgttgcagccatggtgcctgcatgcgagcccagtaggcagcccccacgagcagcagcagaggagctgccagtaggggcctcagctgggccccagccgcgcaacgtggctgacaccaatctggaaggcgtcgactaagcctcaccgtgccttcagaggcttcttcctgcctctttgcatattcagcataacagcttgtcttccgaaaaaggcattaagggctagagatgtcaaatggaagagacttaggatcaagacattttttaatgttaggcagaacacattcattcagactttgctatttgttgtcaatttatagctgatttgaaggttttctatttaacactggttgacagtataattttcccaaagggcaacaaaacatacagatagcaaatttatattccttttctgttaagataatacttaaatttgttaatcaccagtaagatttgatgtttaaagacttccactgcaatatataaatactgaaaatgtgatgttctgcttatttggatatatagtttaacaagttccatagtaatttatggatgcccaggttacatttaaactatacatatacataatatatacatacgtgtgtacttattatatgtatatatacacgtatgtatagatgtgtgaatatttgtttatatacatatatgcacgtatctatatgtatatataaatgcattattacacatacatttctctcaccccttaatgcatttttctcaatgcagaatatttagatgctaatcaaaaaaatgatctcttacttgcacttgagactatggttgactaatgctctataaatccgaagagagttcggactataagtatttaggctatcattatgttgggcaaaaataagtaacccaatggtagataaatgaattcaaccagttgatcaaatggcagaaaagcagttagactacaatctgtgcagacagcatggacacaaagatgaccacaaggggcccaaaacagaaaagagaaacacaagctcacctcttggagctgcttctcctacacttctcagcccattgctttgccaccccctcatgtgccagggcatcccattccaggcttcctgcaaggaaacggttggaagtgggaaaggggagctagggattgaggggttaagggacctcacactaagaaggggctgtgctttgatcccctgcctcttgcactaccaatgtctcaagacataatattcatctcttgctgtcagacccattctatattctaaaagcttctgctccttccttcccaatttctcctttgtagcaggaaattacacccagccctcatctcaattaatgctaaataaagctattgtttttccaaaacacaaatctacactgggtctcaatatcagtgatgaggcttacaaaccaacacgttttctgccatgaggatttctctttaggccagaagtacaaaacaaaaaaaccaatggattttaaccaaaatgatttgaaatataggtgaggattcaggagaaggcaaaagctagaaacacttggggttgtcaacatgagtattacattaacattgcttgatgagaacctctaatgatactgacaacataaattacctagggtaaaggatagctgcaacaatgaaacaggaaagaagagagggagagagaggaaagggaaggaagaaaggaaggagggagaagggaagaaagaaacaatgtctaacccaaccctatcttgaaagttgaactcaagtagaaaaatggatagaaacaaaattctctagtactcatccaggaaaccattcttcaatgttgcatgtggctgtttgccaaggcacacaaagtgcttgtaggcagcaaccatatgctacaagaattgtaaactgcatacagtttgtttgaagtagacagtgaggataataacaaagttgctaggcaggaaaaaaaatcaggaaaaaagcttgtcgctatttgagaatctgtatatttttaaaggcttaaaatattataaccacagggtatccagccaaattcaacattactgcaagtcttagagatttaaacattcatttgattcagagctaaatattcaccataatccaggagggtctccttccccactgcagaggcagaacgtccaagaatggagtaagattagtcatagtaaagtctcagtctgaatatttagcaagagaaacaggcagcagaggaacccaaaggcagtaaatcaaatattctaaaacccaaagttcattattttcatccaaaagactttcacagaaacacattactcacagccatgtatatcttggacagagtttcagatggaatgacttgtctgaaatttgtaaagcttaatataggttttgggggaattattttaatattcaaagaatgttttattatagtcctttgtgttaaaatttagccttactaattataacaataactcataaagttctaaattcagaaggaatgtctgttctttatcaagtgtatgtaactattttttagaaatgccatctactttctagaaacactaaagttattgttttctaagttaaataactataatttatatatctattaaaaaggtacttctcttcccaaa

SEQ ID NO: 40 - DNA, 11868 bp, Artificial Sequence
  LINC01105
agtctggctggagctggaccggctggtggcgccaggcagtgccaagcacccctggcagccctgcagagggttctcaaatccagatttcattctgcagtcccggcagtgttttgacgactgcctcactaaaggaagctaaaagctgtgctgatgcctcccagacgagcctcgttggaagcacagaaccttcacggctcggagccgctgacaccgtgacaaagggagccctgctcaggagaaagagcaaatgagaggcagttgcactttttcaggtgtcaggctggaggaagccacttgaagatgaatctacctctgccttaggattgcctgatggcctgtgccattccatgttatatctactgatttgctccctgtattcaaagattttttttttttacttaattctctcttactgaccctgagagtgaccatatttttaaccaatttggtcttcagcctcaaaacttagctctttccttttgtggtccccgaatcctatcacgtgtcatggtggctgtgaagatgtttgccaagcctgctgagaaggctcatctgtggcatccaaaagcagagatttcaactctggacccctgtgacctgcctttgtaattatggatacccagcactgttttgaaatatcagtggacatccagtttttaaaagccctcagagctttgggagacacccctttatctctctggcatgtcagagaaccgattcaacccttctcatctcctcctccttccctctcttgggccatcaggatgcggcagcaactcactgtgcatgtttttacagctcttctccagtaatgctgccatttccactgcagaccacaggataaaaggaccgcttcaccgtggcccaggatacccttttaagtaggaggtaactattcagtttcgtagtggcccatacataaacttgattatgttcttcgttgctccaatatactatttgtgtgttttgttttttccagagggagaagaaagtactgctttgatctaaaattaagcaaacgttcttcaataaacccaccatgagacttgaccactaatggtgaccagcagtggctttgtcatggccctgcccactgggggcaggcacatgccggggccagggcaggctgccagctggtgagcacgaataggtggctggtggagcgcatgcagtgggaagggcagatggctccattttgatttgttagcaggccacttcctcggaaggggctttcccttcagtggggtctgcaccgccagcctcagctgtcttggagcagatgtgtatagttagagatggggaccttttcactgtaaatactgctcacatgttcctaggctgactttactatgtgcagagcctcttctcaaatatccaaatcccctctgttgggtactacagaacagatgttaccctgcctcctattacattaatttacgaactttacatatgctgagttacggaccctaagctgttgcatgtgcttggctcttatgttccaaaaagtacatttgtatggttttgtggaaactgtgctgttctgcttttgcagtctgtgagattctgattttttttttctcatcagcaattatccttgtcttggaacatcagagcttgaagaaagggattctagcagcccacctctctccttcctaatccagatggttagaggcttagagagaggtggtggttgctctgagtttaccagattcagtgacaaaccccttctaatttctaatcaatctggcagccttcatttaccaaaagttgacttttgatagtataacttttatacaccgtgagacaacttattttaaaaaacagtttagaaatatttaatttttttttgaaagactttttaaggtcaggcaccatgggtcatgcctatcatctcaacgctttgaggactgaagtgggaggatcatttgaggccaagatttcaagatcagcttgggcaacatagtgagactctgtctctaaaaaattaaaaaaaaaaatagccaggtgtggtggcgcatgcctgtagtcccagctacttcggaggctgaagtgggaggatccattgagcctaagagatggcgattgagtaagccatgattgcaccactgcactccagcctggacgacagagatgtcagaaaaaaattagttttattattattagtttataataatattattttaatattaatattatttaataatttcatattatttattattattagttttattattagcaaaactgagtggaaggcacagagattttccatattcttcctgcctctccaacaaacatgtctccctcattatcaacatttcttcccagagtggtacactttttataattgatgatcctacactgacacatcatcatcacaatgagttcatagttgacgccagggttcactcttggtgttgtacattccaggcatttggacaaatgtataatgacatgactccaccattttagtatcatacagacgagtttcactgccctaaaatcctctgtgctccactgatacttactccttcatccccttgctccctcagcccctgacaaccactgatctttttattgtctccatagtttggtcttatttaatattttttgaggttgcactgttgccccaggacatcgtatgagtagagggttaaccaccttagccaagagtaatttggtctggtgagttctccaccttcaggacaaaagcatttcagaaccatcctaacaatagtgttcccataagtaaccagacactgtttgtatccatagcaacatggctccatgagccctgcttccgaggagcagctgcccttcctgggcactgtcaagagttgttcttctctgacatccacacccttctttacctggcacataccccagcccaggcaccaggcatccagggccttctatggctgtccggatgcattccttcacagctggaatgtggttggcttgttgacttctgttcccagcatagtgaacagtgggcactataagccagtaggcactcaattgatgattcttcaatgaaataattgatgccacttttaggtcagtctttcttgtacgttacaccttctgttgttcaacagagccccacaatatcccagaacttggaggtcttatctcggggtttctcagatgttggagtacccaggtatcacctgctgagccagtttccctggcctcacctgcaggggctctgagtcagtaaatctggggcaggcccagtactttgcatgtgagcacagacccaggtgtttctgaacctggtggtccagggactgctgcaggaaggagccaataggactgcatgccttagaggcagtgggtctcatccatccctatctatggcactgactacaggccatgtccaggccacatgggcacatgctattataattattttgtgtgatggatgagttacagaactggagccctaagacctgagttctagtttcagctctgccagttgctggctgattgaaactgaacaagccacctgccttccctgagactgtctcttctcctgtgaaattagggcattagaatacatgaagacccctttatgtccttaataacctgtaagtttaagaacctagggaatctccatgctggtggctgcggttatatccccttatcctcaactcgtgaagaaagagtcaaaaatggcagcagggttgtgtcaactgctctcctcagcagctatcataagggaattgcctttgtcattttccccagccatcaccacactcccacacggccaccatcacctaaaccatctggcagtgggggttacctcctaaatctaagacgcagagacccaccgcaggcctttctttctggctgccctccactcccacccagaggctcagttttgctgggctgcacacctccgaggactcagttctttgtgtttcatgttgtttcatatccactagtgttacagaaactgctgcaaaccagggaccaaaagtccataggttctaattctagctgtgacactagtgagatgagtgactgctggcaagttactttatctatctgacctcacctcccatgtacaaaattgggtctgtatgcacatttgtggttctaaatcctggagtccaaatcagagttctttgtgcaaaatatacgtagctaggtcctaacctcggagatcctgactcagtctggggaaaggcgcagatcttggggagaaaacaactctctagaagagtctcgccttcagtgagtgacaagatctctcctgtctctcggttcacaatgttaccctaactaatccatcctctgatgtcacctgctaacaacttcccctgtggcatcaaaccagtagcccatttgcagctagtacaaacacttctttacatttaagttttgtttacgagatttagcctacaatcatagaggctgccagctgggtttcaaatgtgtatgttccattgctaataggaaaaactgcatctattagaaaaattctctctgggagctgagcacagaggcaggccttgtattgcaaacatttgaaaagccataagcaggtattctggactgtgttttagatcacctgagaacatttcttgaacactagtatttgcttagagtgacaaacctattaagtggttctttcaggtaagtttgcatccaagcaatgtcgtctgaatcgcaggaggaagtcaggagttgtgtctggctttctggccatacaaatggcatatgggaaagtcattgtatattattaatatcctttgatgtatattattatgactttctcacggtagtaatgttgttggtttttattaatgttatttttatagcaatgctaatattatgagctaaaagtttctgagcatctgctgggtgccaaaaattcttataaatgctttacatgcattagctcctaacaacactttgaagtaattcttattgtccttacttgacatatacaggaataaaaacctgaccattagaccgagcgtggtggctcacgcctgtaatcccaacactttgggaggccgaggcaggcggatcacctgaggtcaggagtttgagaccagcctggccaccatggtgagaccccgtctctactaaaaacacacaaaaaattagccgggcgtggtggtgggtacttgtaatctcagctacccgggaggctaatgcaggagaatcgcttgaacccaggaggcggaggttgcagtgagccaagattgcgccattgcactccagcctgggcaacaagagcaaaactctttcaaataaacaaacaaaacctaagcatttgaggggtttggcctgggcagtggagcttgtgagctatatgagctggaatctgagtcaaggctgggctggtgaaaggagttcactcaagttcccaaggtattctgtcctccaggactctgaatcacctgggaggagaaggaattgtggcgggcctaacaccttttctttcccaaacaccaagagcaggttctttctgttacatccattgaggtcacattcttgaagtgcattttgaggaagtcattattttcgctacagcagggactgatgtatcagtctattagaattcagaaaaaagtaagcaaacaaaaaacgtgttggaattattctcttctagcattttgaaatgtacaatggttaatgttaactatagccaccatgatgtattgaagaccaggtcttattctttttatctaactgtacatttgtacccattaacctaatgctcatagcatcaagaaaagatcaatatttaaggtgacaaatatcccaattatgctgatttgattatatgaatgtgttgaattatcatatgtactcccaaaatatgcacatctaagatgtatcaataaaaataaagacaaaaattaaagcttttacagtagaaaaaaggttttagagaaattatgattacttgattcacctaaactgacagtcttgcttggaatgaattactgctttttgtaacatagttttagaagagagattcacatttaatgttactttgtgctaagcactgtaatccatgcctgggtgctcacagcgctcctctgggaccaggcatcaccatctcctctgtaaaaggaaggtcagcctgttgccaagaccacaggataaacggcttggctgatttaggaaacccagttggtcttatgacaaaacatgcgcatttgcccttcaccaggtgatttttctgtagggttatcttcaacagtccgacaaagctgtgttccaccagctcaggcaggctgtgaccaggatcaccagccatgtggcatcaggaagaaggggctgtgtggccaggctcaatctctggtcctgcagccttctgcctttggctttctgaagcgagctgaactagagattgggcccagctcggcagcgcagtttcaggagagccaggatacaaaccatcccagtctctgttcccacaaaggagaagctaaaccattttttatttgcccattctaagtgctaagtgatatgcaactgcttcacataagccttccagccttccagccgactctgctttcaggagatatccttatgtcccttttgcatggcttaggagagtgaagcacgtgagaattgaacgaggggtcaagggtcacataacacatgagcacgaaaccgggactctcctggggtatcagaccccaaagccagtggtctgcgcttgatctttgctaacgtccgagaagcaataagtccagggctcttgacacattattgtgcattttactttgggagggactgtgggtccactctgcttttaacaggaggaaattaaatatttacatttgattccagtttggccccatgactgtccggcttctttcctgtcaaaggcccaaattccctgttttaaagtagagggtgaatttgtgtaatgaggatggatcgggcacgtgtagaacacactctttcacctgcagattcacactccaaacacaaagaaatactggatcatatatggtatattttaaaagatgccataggcatacttaaaaagcacaacagaattctattttctcacgtcagagggcagagtcttatgagctattgagaggaaaactgtatcttaggggttgagagcctaacgtctgcttgggggtgtttgtggccctggcagctgttgtgtgcagtgcacattagaactgagcagctttataaagccaggaacaagggtagagtccctgtgtctctgaatagaaattagcgatgcttagccttctgtaccaaggaatgcatcacaaaagctaatgctgggactgggcctggtgtgggataggagtcacacagaggagtcagaacgccaactgtggctggtgtaaggggcctccattcacactgtctttgctgtttggaaaatctgagcaagaatttaaggtaaaagctgatgtggaacagcttgcaacccaaaagtctcaagcccagcataaaaatcattgctccagtgaagatgcctgcagagctcaaggcatttctgagactccatgggagaatgattcctaaggaaggtgtgcccccagcacctgtggagactcatcaccttgagggcaaacagactctgtaaaaggagaattcacctctaaggagctgcagacaatagagggattaaaatgggcctttgatcattcaaaaagcattttaaaggaaaaaataaagtaacataatccaaattccaacaggagacttgaaaaagaaggtaataacaaaatggaaaataaagtcactgaaataaagcaagtgagttggactatgaatgtctcctgtccattagctgtgtccccggctgcaaggtccatggggactgtgcctcccttgaccttgaatctcaatgccttagcaaagtgcctggttctgggtaggttcacagtacacatgtacctcccaaatggatggattgccaacttaaatgttcataggaaggtgctattttcaggcacttcaggtgtggacatcggtgttgtcagatcttttctgttctagccaggcattgtggacatcaccttactatgtgagggaacaagctgcattggtggagaggaaaccagcaggagcacaatagtgacccatttctcttgtcttatgcactgcagtggaaatagcccagtgtgcatggtggattttattatggtgccagtagaaagatagggggtttcctctatgagctggctgacttacatgagctcattctctgcagcatttctctagccatctcctgtcacatcgtttattgtgttcactagtcctgtgctaacgaggatctttgaaaaatgactggtatggtaatgatctacggaacttactgtagatagcaattaaatatcgttaacggcgggttacgctgacacattaaaaggcctacaggctgcgatttatgaagacagctctgctgcctcctttgtatgtgatgcatttctctggtttcggcttaggctgtctggtctcagaagggaatgatttccaggctttccccatcatcactccagttgccaggccacccacaatcacattagcaagctttattgtccctattgcacctcctaatgccctcagggtgcttgaggtagcttttatcaaggtaaggcctaggtcaacattttgttgtgcagaaaaggcatctgctttcagaggagaaaatttagatacaatattgaggtgaatcttataagtgatgtaagataatttgatgacaagaattgagattatatgctgagatcttactgtcttaaactttgttgatttctgaaaataatagaaatgcaatcctagctaaaggaagagaagtagtctagctcaccagtggccagcaaactctgtaaagaagtattgccttcatgcagcaatctcacctaatatgagactccagatagaagatagctcctgagaagtcaaaacacaaaccaatatcatgtaaattactctcacgtgaaaaatagacaagagataaccaacccagtcccaaccgtctcacacccccactggcctcctgcactcatggatgccacattcttcaacatttgtacttctgttaacagagttaaagtagagcaaacataggctcttttaccaagagcgtatggactaaatacagatgcaatgctaataaccacatgggaaaaacaagatcctgagacactgttatgtttttctccctcttttgtggccaagagtgtgtgctctcttgcctttgtagattttgctcacgtttttgggtgataggaccaaaagcagtagtgtctaggccactaggagacaaggcaaaccattatctgtgaaagcctgggttttctgagaggaagcatgctggacactgccagtagagggagaagtcatggtgtgaagttttccatgatgagagataaggacagctagggcatggggatgcagaggatgttcttgttgttgatggtgttgtggaggttgtaccccaagtctctgggataagacagccccatgcacatagaggtcatgaaaaatgtgaggaccctggacactgagtgtcacggctttggggacagtgatgacatgtccctgtgtccaaacagctcagtcagcttatctaaaagggatggagagtacttctgtgggaacagttggagctgaagaacagagaacatttcctttgatgtttggactctacggaatctttgggaattgtgttcaagtccaggaggaatggctgaaaacatgattgagataaatttgcagccaggaggttgaagacaaattaggatctgattttattcaactgggagtaaccatggccaagcataattcttctggtggattctgaagttatttggaatttgcccataagatgaattttcctgaagaaggaaggatgtggaggctgatactgaggccccatttccacatgtgaacttctaagaaaccacagctttcatccagagtggagatgaatggcactggggtccacgttgccagaatgcctggggacaaggaatgaggacttgtcacccaaggcacgagatccatagtggctacgggaatgaagccactgcctttgtggaaatgactaattcacccaaatccaaggtgttttccacaactgagaggcctgggctgaggatagagatttgagccttaactgagacatcctactgggaagttgcatcagtggtcagtatctgaggccacagaaaatgtcacatgatggtgtgtcacagggctccacatttaggacatttgtgtactcaaagagaatctttgacgaccatgactcagagaaatttttaatgacttaaaacaggttttggatcatgttgatgatgacagatggtgcaagccacctacctaaatccctctggggaggggtggtatttctgcattgttctcagagcagaaatgtgacatggatgtggaggctctggacagtgagatgtgaagctggaggcatggcttggcctccctagaatgggtgtggccagggcaaagctgggacatcctcaacccaaaggtttgcataactggatttgaactccttatagatattcctaaacagtggtgatacggaagggagaggaggaggaaaaaaggatggctcttcatcaagagcaaaagcaagagattcagataggagatttcacttggcttttctagtcttgggtggggacccattatggaagtgaagagctctggaatcttccagagaaacaagcatgggtatcctttaacaggtcccagatagccagttaccgcagaacaatgtcctgttaccagaagcttattgcagaccttgtaacctgaatcattgtgttggcccagggcacacccaggagggtggcttgggaaggagattccaggctgaggtaaataccgacatctgatttcctgacattgagtaggaaagcatttcagagacaagctccaagagctttggaaaggggaacattcacccacttcccacaatttataagggggctggcagtggttgttttggggaggataataatgggaaaagagaacggggtatgttatggcacacagaaccaaaaatgaagattcctaagtagtaatctattagtgagggaattcttgggcaatttcaaaaaactcaaaacgtgttacagagaggagccccttggactttgtaggagactcgtttgtctatctggccccaaggcccagaagtagctgacaaagagacccagttgtcccctggatgccaaacttggggagagaatggtcctgggtggcagcccctccccatccagcctcagtcagagctctccagcaagtcagcctgcaggtagctatggagttgcagtgtagtcctgttattaatggctttctgctttggctggatttcagacataaagaagagaagaaggaaaggtctgggtgatctgcctcttctgataacactaaagttgcacacatcacctcagctcatatttgatgggctgggacttagtcactaagccacacccatctgcaaaagtgctggaaagcgttgcactctctgatgaccacatgcccagctaaatattgaggtcatatattcctatataataagacataagcaaagtgcagtcactgagaatcactagcagtttacaccacgagtatcttcacagcccagaaaagacactgggttgagttaaaatgaaaactggaataaatacaatgagaagatagaaagcctgctgagaacactggggtacttgagtggaactttaaacagtgtctttgctaatgtgtatggtaactgttcagattgtctgtttctttaagctaattgttttctgattgttgaagcaataataactcatatcttgcttgagaaaaaattaaaaagtatgaaaaatcaaatataattatcacactacc

SEQ ID NO: 41 - DNA, 6132 bp, Artificial Sequence
  PCDH9
agttcagagagaggagagggagaaggagagaggggcagaggggaagggagagagggagagcacgcgagacggaaaggagcgcctcagagtctctgaagcacgcaagagataaccgattaggaatttttcgggcaactgtcacccggatagctgtcagagaatcatcatcaccgcaactctgacgtttcctacaagaagttagagacttaagcagtattggcatcggatggaaatggtatgcatgctgctgtggaaaatatccctgagctgaagaagtgcaactatgtgttgtgtgtgctaaatgcccagaagaacccagacccagtgggtaagagagacgaaatgtggagagaatgactaacgacaaatccgtgaatttgttctctggagttgctaatttgccagcccgaagcaacacattttacaaggaggaaacattttgctgcttctgatttctccccaaactggtgctaccagatgcatggctttctatgtgttggaacaaatcattcctaactgcagcatactgggaaaggggaaaggttgaggcaactaaccggctgtctccaaataagtgatgagatataatgcatcctccagtccatgcacgcttcctcttgcaatttgtgcatcattcctcagtggaaacctttaaaccctaaaatccaggaaaagaaaataaatacattatcatggacctgagggatttttacctgttggctgctctgattgcctgtttaaggctggattccgcaatagctcaagaacttatttacactattagagaggaattgcctgaaaatgtgcccataggaaacataccaaaggatctgaacatttctcacatcaatgctgccacagggaccagcgccagccttgtctacagactggtttctaaagctggggatgcccctttggtgaaagtttccagcagcactggggaaattttcacaacctccaacagaatagacagagaaaaactctgtgctggcgcctcatatgctgaggagaatgagtgtttctttgaacttgaggtggtgatcctccccaatgatttcttcaggctgatcaaaataaaaataattgtcaaggataccaatgataatgcccccatgtttccatctcctgtcatcaatatttccattccagaaaacactttgatcaacagccgctttccaattccatcagcaacagatcctgacacaggcttcaatggtgtacagcattatgaattgttaaatgggcagagtgtttttggactggatatcgtggaaactccagagggagagaagtggccacaactgattgttcagcaaaacttggatagagaacagaaagatacctatgtgatgaaaatcaaagtagaggatggaggcactccacagaaatccagtacggccatactgcaggtcacagtaagtgatgtaaatgacaacaggccagtgtttaaagagggtcaagtggaggtgcatattccagagaatgctcccgtaggtacctctgtaattcagctccatgccactgatgcagatataggcagtaatgctgaaatccggtacatttttggtgcccaggtcgcccctgcaaccaaaagactctttgctttaaataatactactgggctgattacagttcagaggtccttagatagagaggagacagccattcacaaagtgacagtgctggctagtgacggcagctccactcctgctcgagcaacggttaccatcaatgtcaccgatgtaaatgataaccctcctaatatagacctcaggtacattataagtcccatcaatggcaccgtgtatttatctgagaaagatcctgtcaatacaaagattgccctaattacagtttcagataaggacacagatgtgaatggcaaagtgatctgttttattgaaagagaggtcccatttcatttgaaggcggtatatgacaaccaatatttgttagagacctcttctttgttggactatgagggcaccaaagaattcagctttaaaattgttgcctctgattctgggaagcccagtttaaatcagactgccctggtaagggttaagcttgaggatgaaaatgacaacccaccaattttcaaccagcctgtaattgagctgtcagtttctgaaaacaaccgacgtgggttatacttaacaactattagtgccacagatgaagacagtgggaaaaatgcagacattgtttatcagcttggaccgaatgcctccttctttgatctggaccgaaaaacaggagttttgacagcctccagagtatttgacagagaagaacaagaacgattcatttttacagtaactgccagggacaatgggacccctcccctccaaagccaagcggctgtgattgttactgttctggatgagaatgacaatagccccaagtttactcataatcattttcaattttttgtgtctgagaatctgccaaagtatagtactgtgggggtaatcacagtgacagatgcagatgctggagagaataaagctgtgactctttccattctaaatgacaatgataattttgtgttggatccctattctggagtcataaagtcaaatgtctcatttgatagagagcagcagagttcctacacttttgatgtcaaagccactgatggaggacaaccacctcgttcctctactgcaaaagtaactatcaacgtcatggatgtcaatgacaacagcccagttgtcatttctccaccgtctaatacttcctttaagttggtgcccctctcagccattcctggctccgtggtagcagaagtttttgcagtggatgttgacactggaatgaacgctgaactaaagtatactatagtgagtggaaacaataaaggcttattccggattgatccagtaacaggtaacattactctggaagaaaaaccagcacctactgatgtgggattgcatcgtttggtggtcaacataagtgacctggggtaccctaagtctttgcacacgcttgtgcttgtattcctttatgttaacgacactgctggaaatgcctcctatatctatgacttgatccgcaggactatggagaccccgttggacaggaacataggggatagtagccaaccctatcaaaatgaggactatctaaccatcatgattgccatcatcgccggtgccatggtggtcattgttgtgatcttcgtcaccgttctggtgcgctgtcgccatgcatcaaggttcaaagcagctcagaggagcaagcaaggtgccgaatggatgtccccaaaccaggagaacaagcaaaacaagaaaaagaaaagaaagaaaaggaagtctcccaaaagctctcttttgaactttgttactatcgaagagtccaaacccgatgatgcagttcatgaacctatcaatgggacaataagcctgccggctgaactggaggagcaaagtataggaagatttgactggggcccggcacctccaacaacattcaagcctaacagtcctgacctggccaagcactacaaatctgcttctccacagcctgcttttcatctcaaaccagacactccagtttccgtgaaaaagcaccacgtgattcaggaactccctttggacaacacctttgttgggggttgtgacaccctttctaaacgctcttccactagttcagatcacttcagtgcctcagagtgcagttcccaaggaggcttcaagacaaagggccccttacacaccagacagtcgcagcgccgtgttacgtttcatctccctgatggctcccaggaaagctgcagtgacagtggtctaggagaccatgagccggtgggtagtggaaccctgatctcacaccctcttcctctggttcagccacaggacgaattctatgaccaggcctctccggacaagaggactgaagcagatggcaactctgatcccaactctgatgggcctttgggtccccgaggattagctgaagctacagagatgtgcactcaagagtgcttggttttgggtcactctgataattgctggatgcctcctggcttgggtccatatcaacaccccaaatctcctctctcaacctttgcaccccagaaagaatgggtgaagaaggacaagcttgtgaatgggcacaccctgaccagagcctggaaagaagacagcaacaggaaccagttcaatgaccgtaagcagtatggctccaatgaaggccatttcaacaatggcagccacatgacagacattcctctggcaaatctgaagtcttataagcaagcaggaggtgctactgagagtcctaaggagcaccaactctaagaaaaggctatatgggacctaataactttaaatagacatgctaataccgtgtgcgtcagagctttatgtattcaatagatctctacaactatgccccttctagcagggatacctataactttgtgttagcaccatggagaatacaatgtttttgcaacatatgagagaagatagttctagccatgcaattttgtttactagaattgattacactctccagagatctctccattgtgcaaattttttttattattgcattttattttgaccctggactgctgctatgaacaatagaatatgcatttggaaagtaagaaagtttcatggattagagtgactgaaaaacatatccagttagaaaattgtgcttttttttttttttttttttttttttgtcattgatttgtgctgggactgctatacttgacattatactgcaaacaaaacttaaagagataagcattaaacctattgtgctgttaacaacgttagtggacacttgtaagtcaatcagtgttaaagtatttgtaaatagaagcaagctattattaacaacttttgtgtacttataatgttcacctaaaaatgttgtagcataattctgtgttttatggttgcttctgtccttctttttatttacctctttgttgttatttttgttgtttctttcagtgaggtgtttctgtgttagtagtctgtcttgacacacattgttcaaacaatctcaagcacttgtgtttaaaaaaggttctgaaatcttgcttctcatatgatagcttatgatgccggaattctgtaaacaataaagatgaaagaaaaaatgaaaactttatacaaaaaaggacttctgcaaaagcttggaaattcagaacctattttttatcatcttattttcaaagtaggcaaaagcaaaatcacttaattagtaccattaagtgagagagtaatggaaaactgttatccatcaaaagtgatataatatcctgtacttgtcactcatgtaaaactaatgtatcaaaattagcatatatggaagaaaaatcactattcaaaaatagtttcaattgggcaaatgtgtgtctacaactttgttgaaatggcagagtctgtgttgatcctcatatacaataatgttgttgtaacacaagtgttattagaccatagccacaaaatatttaatgtgttgtgccttcatgatgtaacagaacattctccaggtagggtagttgggggaaataaagggataaatctctaattattgctgtttaactgtttgttatcatagttggtcaatgcctggcaggtaccagcatattgtcacttaggtcaaaccaataaagtgacaactaatgttaataagatctcagttgcacgtgcaaacaaatccaaattcgaacattcttaggaggtttttgttaaggcatgacagatgatttaaacaaataaatagcatgcaacaaaatgtctttattgaaagaagtggaagttatcttaatgccacggttcaccatcaatttaaaagtaaaaaaaacaaaaaaaaaacaaaaaatttaaaaaaaaggtttgctaatctgatagttaatttgttcttaccaaaaaataaaattactttgtaaatagcagttcacatttttccacagtataatggaaaataatgggtaggggtgcattgcttattgaagtacatttttgtcggtttgtgaggggtgtttgatgactttgacagaataaatatctaaacaattatccttgttactgctttgccagttctacgttatttacaattattcagctcttgcaataaatgttctgaattcctgaaaaaaaa

SEQ ID NO: 42 - DNA, 6328 bp, Artificial Sequence
  GPAT4
gcacgtcctgacgcagcttgggcccgcggcggcggcaagggcgggagggagcggtcgccgcgggatttggagctgcctagcctcgcggtcgctttggcagcatgtaagcagctgtttgccaagaacccaggtcactgctaagaaagggtgccttcgggagaagagtgtccagaggataccaatgccagatgcatctggagttacactcagcactcgcagtatgagacattgtgtgccagcatctctttccttctggcaaagactgtagctctccaggtaggaggatcctggaagctgtgagcaccaggagccttgccagaggaggatggggccagatatgaactctctaccatgaacatggttctcggcttatgaaggaattttaagtaaaacagttatttaatttccacatattcaagtcaaaagccttctgtgtgaagtgccagtgattacccctccacaggagttatcaggatttttctggcaccaagtttaattcttcttcgtacttctggtagtgacagatctgcaggacagatttatctgttgaatgctcttgggcaggaaaaccatgtaaaacctctggaagcagcatcaggacagcagagcagagcccccgtcctcactgctcacttgcacagaaactccatctggactcggatgcttttactgaagacccatctagcttcaatcatctttagagtccatccattctggagagacctggcgtttgcagttgcctcctgtggccgtgtttttctgtcattctgttcccaggccttctattcaggcggttgaagggtgtggactttggaatggggtttgctgttcttcgggaacttgcttcctttccctggctggtgctgtcaggaaggaccatctgaaggctgcaatttgttcttagggaggcaggtgctggcctggcctggatcttccaccatgttcctgttgctgccttttgatagcctgattgtcaaccttctgggcatctccctgactgtcctcttcaccctccttctcgttttcatcatagtgccagccatttttggagtctcctttggtatccgcaaactctacatgaaaagtctgttaaaaatctttgcgtgggctaccttgagaatggagcgaggagccaaggagaagaaccaccagctttacaagccctacaccaacggaatcattgcaaaggatcccacttcactagaagaagagatcaaagagattcgtcgaagtggtagtagtaaggctctggacaacactccagagttcgagctctctgacattttctacttttgccggaaaggaatggagaccattatggatgatgaggtgacaaagagattctcagcagaagaactggagtcctggaacctgctgagcagaaccaattataacttccagtacatcagccttcggctcacggtcctgtgggggttaggagtgctgattcggtactgctttctgctgccgctcaggatagcactggctttcacagggattagccttctggtggtgggcacaactgtggtgggatacttgccaaatgggaggtttaaggagttcatgagtaaacatgttcacttaatgtgttaccggatctgcgtgcgagcgctgacagccatcatcacctaccatgacagggaaaacagaccaagaaatggtggcatctgtgtggccaatcatacctcaccgatcgatgtgatcatcttggccagcgatggctattatgccatggtgggtcaagtgcacgggggactcatgggtgtgattcagagagccatggtgaaggcctgcccacacgtctggtttgagcgctcggaagtgaaggatcgccacctggtggctaagagactgactgaacatgtgcaagataaaagcaagctgcctatcctcatcttcccagaaggaacctgcatcaataatacatcggtgatgatgttcaaaaagggaagttttgaaattggagccacagtttaccctgttgctatcaagtatgaccctcaatttggcgatgccttctggaacagcagcaaatacgggatggtgacgtacctgctgcgaatgatgaccagctgggccattgtctgcagcgtgtggtacctgcctcccatgactagagaggcagatgaagatgctgtccagtttgcgaatagggtgaaatctgccattgccaggcagggaggacttgtggacctgctgtgggatgggggcctgaagagggagaaggtgaaggacacgttcaaggaggagcagcagaagctgtacagcaagatgatcgtggggaaccacaaggacaggagccgctcctgagcctgcctccagctggctggggccaccgtgcggggtgccaacgggctcagagctggagttgccgccgccgcccccactgctgtgtcctttccagactccagggctccccgggctgctctggatcccaggactccggctttcgccgagccgcagcgggatccctgtgcacccggcgcagcctacccttggtggtctaaacggatgctgctgggtgttgcgacccaggacgagatgccttgtttcttttacaataagtcgttggaggaatgccattaaagtgaactccccacctttgcacgctgtgcgggctgagtggttggggagatgtggccatggtcttgtgctagagatggcggtacaagagtctgttatgcaagcccgtgtgccagggatgtgctgggggcggccacccgctctccaggaaaggcacagctgaggcactgtggctggcttcggcctcaacatcgcccccagccttggagctctgcagacatgataggaaggaaactgtcatctgcaggggctttcagcaaaatgaagggttagatttttatgctgctgctgatggggttactaaagggaggggaagaggccaggtgggccgctgactgggccatggggagaacgtgtgttcgtactccaggctaaccctgaactccccatgtgatgcgcgctttgttgaatgtgtgtctcggtttccccatctgtaatatgagtcggggggaatggtggtgattcctacctcacagggctgttgtggggattaaagtgctgcgggtgagtgaaggacacatcacgttcagtgtttcaagtacaggcccacaaaacggggcacggcaggcctgagctcagagctgctgcactgggctttggatttgttcttgtgagtaaataaaactggctggtgaatgaactgggggacttctccctttactttctcccctggctgtggccctgagtagcaggcttctcgtgaggattcccgttctcttctgggagcatggccctggggctgcggagaagccaactgactgctggagcgaggaaccctgcagctcagaaggtgaacagctcgtctcagatgcttgcagatctttggttaatttagaatttccagcacagacgtggatttctccagagacggggtgtgtgcgggtcgctgatgtgaggcctaggggaagcaatgagtaaactccagggtgggggaggagcaagggcccggggagggctgcagaggggccggggcggggcagggcctgtgctgcatggtggcttctgcaggggagggacaggggagggctgcagaggggcagggtgggcagggcatgtgctgcatggcagcttctgcacagccagagcaggcaccacaggaaaagagtcggccactggtgcctgctgtacagtcacagtggaggcagagccaaggccaagcagcccctgtgggttctggggtttcaccagtttcatgctcctcagctccccattcatgccccaccagccctcacttgggacccatgctccctcgtggcacagtcatgatgcctctcaggattttgtgcctgtggtgctgagtgtcacgtccccaaggtcgccctctggcctgcagttcagggagtgggtgggagtgaagctgtgctcctggggctgcagacagatccactttgcatgtggtacctgctgggttggccctgcaatctccttttctctgcacctacctgtgacctccctgggagagcctcccatttcctcacctgccctgttgccagcccgggggaaatctttttgctctcaaatgaagactgaaaaaataaagtcagtgttatgactaataagtctcttaggaactgttttacaaaatgcttaagaataaaaagtgattttcagcttttataggtgatgtttacagtgtttgtaaaccaactggagggatcagtaattggtcttaaaagatcaggttctcttttaaaaagttcatctgaaactttatggtttgttactttcgtgatttgcataggtatttatatatacacacacacacaggttttgcttttgtctcacattcagcacagctgtctgcggcccctgccggcaggtgtggccgcacctggtgtgaagtcacgtggagtcagtgctgtggagggaagtcctgtgcgggccgggcagtgaggagagcactgattcacgcctgcagaaacgtaacctcccctttccgtgtatgccttttaccatcatccaggcgactgctccatccttttaaattaggggtcctgcaagccccaagtgacccatagtcagagtatctggtttggggtaaccgagttggtcttatggggcaaaaactcaagacacttagaaacatgcaaagtacaaaataatgtgttccctcctgttaccccagcaagggtggggctgagctgggaatgacacccagtggtgtaatgagtggaaagtgctggtcagctgctaacccccctccaagcctgctgcaccttcacttctctgcatccgtctcctgagtcataactagggacttggctagatgacctcagagacctcgtccacctctgaattctctgtttttaagcccatagttcaaactttggctttgatctctgaagtcttctgggtttggaaatacgggaagtcagctttgaatccattgcttctctaaaacatcagggctagtggaactaacccacttgagggtgacctcaagggctttaggcagccatggggctggggccatactgctctcaggctgggcagtatcttcattgtggttctcagacagccttttttactcaaacatgagactttccacccaccagttagggaactttttttttttttttaaacacggagtttcactcttgttgcccatgctggagtgcaatggcacaatctcagctccactgcaacctctacctcccgggttcaagtgattcttctgcctcagcctccaagtagctgagattacaggcatgcaccaccacacccagctaattttttgtatttagtagagactgggtttcaccatgttggtcaggctggtctccaactcctgacctcaggtgatccactctccttggcctcccaaagttctgggattacaggcgtgagccactgcgcccagccaagagggaactttttaataaagctagtgggattcccttgacagcagaaccagccttgggacttgatgcttcaccgtgtcagaatccgtccctggtgctgcctttcagagaagaggcttgatgtgtgaggggtcagggggagtgctccagatccctgaaatgcccttcccagaccagtgacaggcatttttgggtgccatcgtgtgaccttcacggcacagcaaacagtgggcactaaccctgttgtcctgtggaaatctgggtctctgaatcctgccatttccttcctggaattggccaggaacttgattttctgggctattgcttgctagtgtcccctgatgcatgaaggatccccccatgtcataggtcccacctgcctgctgtgcatcccgggtggccagactcggcttctccaggtgcacttgtcccaggtggcccggtccgtaggctggaagggcagctgcaggtgcactgcctcgcggacaggttaggatatggccacgcagccatccatcttctacagcacgcacaccccactctctcccccagtcaatatgtctctctccgatgggaaagttaataaattttgctctagattaaaagtattgatcatttcatttgtaaacgataaataaaaagggggaacttttcattgcgccaggggtggcacctggcgtgtgttgcgggggtgattgcgctggctgccggggggtgggcttctcatatgcattctggccggccagctgcattgatttcctattagtctcccagcaccacccagtaacacatcatttcagtacctgctattaatggtcttttgataaataatcacttgtaagtcaataaatttttattaaacagtgaaaaaaaaaaaaaaaaaa

SEQ ID NO: 43 - DNA, 2293 bp, Artificial Sequence
  OLIG1
atcgtttccccgcgcgcaggtccgcggggaggggcggcctgccgaccggcccaccccagggcgttcctgaagggcgtcctcggccgcccccaccgcctcccagatgtactatgcggtttcccaggcgcgcgtgaacgcggtccccgggaccatgctgcggccacagcggcccggagacttgcagctcggggcctccctctacgagctggtgggctacaggcagccgccctcctcctcctcctcctccacctcctccacctcctccacttcctcctcctccacgacggcccccctcctccccaaggctgcgcgcgagaagccggaggcgccggccgagcctccaggccccgggcccgggtcaggcgcgcacccgggcggcagcgcccggccggacgccaaggaggagcagcagcagcagctgcggcgcaagatcaacagccgcgagcggaagcgcatgcaggacctgaacctggccatggacgccctgcgcgaggtcatcctgccctactcagcggcgcactgccagggcgcgcccggccgcaagctctccaagatagccacgctgctgctcgcccgcaactacatcctactgctgggcagctcgctgcaggagctgcgccgcgcgctgggcgagggcgccgggcccgccgcgccgcgcctgctgctggccgggctgcccctgctcgccgccgcgcccggctccgtgctgctggcgcccggcgccgtaggaccccccgacgcgctgcgccccgccaagtacctgtcgctggcgctggacgagccgccgtgcggccagttcgctctccccggcggcggcgcaggcggccccggcctctgcacctgcgccgtgtgcaagttcccgcacctggtcccggccagcctgggcctggccgccgtgcaggcgcaattctccaagtgagggcgggcctgggcctggggcgcgacctcggcccggcctcccttcgctcagcttctccgcgcccctgctccctgcgtctgggagagcgaggccgagcaaggaaagcatttcgaaccttccagtccagaggaagggactgtcgggcacccccttccccgcccccacccctgggacgttaaagtgaccagagcggatgttcgatggcgcctcggggcagtttggggttctgggtcggttccagcggctttaggcagaaagtgctcgctctcacccagcacatctctctccttgtccctggagttgcgcgcttcgcggggccgatgtagaacttagggcgccttgccgtggttggcgcgccccgggtgcagcgagaggccatccccgagcgctacctccccggagcggagcacgccggctcccagtactaggggctgcgctcgagcagtggcgggggcggaggggtggttcttttccttctcctccgccagaggccacgggcgcccttgttcccgccggccaggtcctatcaaaggaggctgccggaactcaagaggcagaaaaagaccagttaggcggtgcagacggtctgggacgtggcagacggacggaccctcggcggacaggtggtcggcgtcggggtgcggtgggtaggggcgaggacaacgcagggtgcgctgggttgggacgtgggtccacttttgtagaccagctgtttggagagctgtatttaagactcgcgtatccagtgttttgtcgcagagagttttcgctcttaaatcctgggggtttcttagaaagcaacttagaactcgagattcacctttcgtttccctttccccaaaagtagcgtaaccaacatttaagcttgcttaaaaacgaaaaccaaccgccttgcatccagtgttcccgatttactaaaataggtaaccaggcgtctcacagtcgccgtcctgtcaagagcgctaatgaacgttctcattaacacgcaggagtaccgggagccctgaaccgcccgctgctcggcggatcccagctgcggtggcgacggcgggaaggcgctttccgctgttcctcagcgggccgggcccttgaccagcgcggcccgcaggtcttccttctcgccgtcttgcagttgaagagctacatacgtagtcagtttcgatttgttacagacgttaacaaattcctttacccaaggttatgctatgacctttccgcagtttactttgattttctatgtttaaggttttggttgttggtagtagccgaatttaactggcactttattttacttctaaccttgtttcctgacggtgtacagaatcaacaaaataaaacatttaaagtctgattttttacaaaaaaaaaaaaaaa

SEQ ID NO: 44 - DNA, 1657 bp, Artificial Sequence
  MTERF4
gaaggacgggggaggaccgctgcttccggcgccgtaactgctgccatcttctccgcgctatggctgcgttcggccgtcaggtccttgattggcaccgcctgatccccctcacctgggcctgtatggctaggcagactcctcatcttggagaacagagaaggacgacagcttctttgttgcgcaaactgactacagcctccaatggaggggtcattgaggagttatcttgtgttagatccaataactatgtgcaggaaccagagtgcaggaggaatcttgttcagtgcctccttgagaagcaggggactcctgtggtacaagggtccttggagctagagagggtcatgagttccctcctggacatgggtttcagcaatgcccatattaatgaattgctcagtgtacggcgaggtgccagtcttcaacagttgctggacatcatttcagaatttattctcttgggtctgaatccagagcctgtgtgtgtggtcttgaagaaaagtccccagttattgaaactgcctattatgcaaatgaggaagcgctccagttacctgcaaaagcttgggcttggagaagggaaattaaagagggtgctttactgttgccctgaaattttcaccatgcgccagcaggacattaacgacactgtcaggcttctcaaggagaagtgccttttcacggtacagcaagtcaccaagattttgcacagttgcccctctgttcttcgagaggacctgggtcaactggaatacaagtttcagtatgcatacttcaggatgggaattaagcatccagacattgtaaagagtgagtacttgcagtattcactaaccaagattaagcagagacacatttacctggagcgcctgggacggtaccaaacccctgataagaaggggcagacacagatccctaacccattgctcaaggacattctcagagtttcagaagctgagtttttggccaggacagcctgtacttctgttgaggagtttcaagtttttaagaagctcctggctcgggaggaggaggagtctgagagcagcacatctgatgacaaaagggcaagtctggatgaggatgaggatgacgatgatgaggaggacaatgatgaggatgacaatgatgaggatgacgatgatgaggacgacgacgaggcggaggacaatgatgaggatgaggacgacgacgaggaggaatagctgtgatggaaggactagagcgaaagggcccagagatatcaaggaagcttttcattctcttaaagcttttgggtcctttacttgaatcttctcaagttattttttattctaaaactggtctcttgatgaaaaaaattataagtcacctgagaggcagacagatcaaaccaaacaggaaacaggaaatgcatgtttgatctgttgtcacgtgtctgtggggagggccctgtcccatcctgaataagatacttatgttgagctattcacatcaaggggactcaatatatcaacaattggttttatttttttctcttttgaatatgttggtgataattccgtgacagttggaagatggggttcattcttccggttcaggaatcactatgtatttccttcttgtgataaaaataaaattacgagaaggcaatgtgaaaaaaaaaaaaaaaaaaaaa

SEQ ID NO: 45 - DNA, 1398 bp, Artificial Sequence
  LINC00632
agtgcgacagacagcctcagagctggtggggagacagcatgccactggaaaaattcgtagacatggaattcctggatcaaatgatactaagggggacttgcctggaagcagacttgtgtccgcagtatacaaactcaccctttaatgcacacactgaccagataacacaaacacatttacccccacagcacctagactcttctcacagtacacacacttgccttccagtacacagacatatccaaaggcacaccgacaagcaccacagcaaaaagatgttccccagaacacatggacaccccaatccccgtatcattagactctcccagaggcacgtatgtactgcttaatgcagagactcacctgaggcacactgatgcaccccgcatgacacagacttgcccccccataaggactctactatgacacacagacaatcccaacatcacacactgttcccacatcacacgaacccattttaggaaacacacagcatacagacttaccccatagaacacggcttccccgacaagcacacatactctcaaggccagtagactcaccccacagcacacagactttctctagagtgtacagcttcttcccacagcaaacagactctccccagggcacacagacacccctgacatcacatactctcaccacagaccatagactcgtcctagagcacagggactcttgccaatgaaacagactttcccgagaatagactcatgagacagcttgaagacccgcatcatgacacaaagactctcccacaacagacagactcaccccattgtgtacagacaagcaccataggccacagaccatcacctcaggacacagacttgcccagcaccacacagacactctgcagagcacgtagagtcaccccgcaaagcacagactaaacccatactacagagactctccctatagctttcagacaagtttaccccaccacagagacatgcaacggtacatcttacaacatatatcactccttgatgcacacaattgtgccacagcacacaaacttgtcctacagtgcacaaattcatgtcacaaaagacacactcaccacacaatacaaatacttgctccagccggacgcggtggctcacgcctgttatcccagcactttgggaggcctaggcaggtggatcacctgacgttgggagttcgagaccagtctcaccaacatggagaaaccccgtctccactaaaaatacaaaattagccgggcatggtggtgcatgcctgtaatctcagctgctccggaggctgaggcaggagaatcgcttgaacccaagaggcggaggttgcagtgagccaagattgtgccactgcactccagcctgggcaacaagggcaaaactttgcctcaaaaaaaat

SEQ ID NO: 46 - DNA, 4907 bp, Artificial Sequence
  ZC3H12D
ctgaacgtgactgtggcgtgcaggaagtggagcattggcatgaagtggctcctagtggctgcttggcgcacgccagctgccctcctctgactccagtggcacctgggggcctggcctcactgacgggagaacattggcgtgaaggctgctggcgactgggccagcattcattgtgaagaccggagggacacaccctgctgctcatgtctgcagggctctgagaggaggaagcctggggcaggacctgcgccagtggccgctgggcacagcatggagcaccccagcaagatggaattcttccagaagctgggctatgaccgggaggatgtgctccgggtgttgggcaagctgggcgagggcgccctggtcaacgacgtgctgcaggagcttatccgcacgggcagccgcccgggtgccctggagcacccggctgcacccaggctagtgcctcggggctcctgtggggtcccggactctgcccagcgtggcccggggacagccctggaagaggacttcagaaccctggccagttctctgcgacccatagtgattgatggcagcaacgtggcgatgagccatggaaataaagaaaccttctcttgccggggaatcaagctggctgttgactggttcagggacagaggacacacctacatcaaagtttttgttccatcctggaggaaggacccaccaagagctgacacccctatcagagagcagcacgtgctggcggagctggagcggcaggcggtgctggtgtacacgccgtcccgcaaggtgcacggcaagcgcctggtctgctacgacgaccgctacatcgtgaaggtggcctacgagcaggacggcgtcatcgtctccaacgacaactaccgggacctgcagagcgagaaccccgagtggaagtggttcatcgagcagaggctgctcatgttctccttcgtcaacgaccggttcatgccgcctgatgaccccctgggccgccatggaccctccctgagcaacttcctgagcaggaagccgaagcccccagagccatcctggcagcattgtccttatggcaagaaatgcacctatggcatcaagtgcaagttctaccacccggagaggccgcaccacgcgcaactggcggtggccgacgagctccgcgccaagacaggggcccggcctggcgcgggcgccgaggagcagcggccaccgagagccccgggcggctccgcaggagcccgggcggccccccgggaaccatttgcgcacagcctcccgccggcgcgggggtccccggacctggccgccctgcgagggagcttctctcggctggccttcagcgacgacctggggcccctggggccgcctctcccggtccccgcctgcagcctcacgccccgactgggcgggcccgactgggtgtccgcgggcggccgggtgccaggcccgctcagcctccctagcccggagagccagttctccccgggcgacctcccgcctccgcccggcctgcagctccagccgcggggcgaacaccgccctagggacctgcacggcgacttgctttccccgcgcaggccacccgacgacccgtgggcccgtccaccccgctccgaccgcttccctgggcgctccgtctgggcggagccggcctggggcgacggcgccactgggggactttcagtgtacgcgaccgaggacgacgagggggacgcgcgcgcccgggctcgcatcgcgctctacagcgtcttcccgcgtgaccaggtggaccgcgtgatggccgcgttcccggagctctcagacctcgccaggctcatcctcctggtacagagatgccagagcgcgggggcgcccctgggcaagccctaagggaccaacacgcacttgcagggaatggcccagcctcgccttgcgtcttggacgggtggacctgtggttgccagcctggacctgagtgggcccatcatggtgcccccttttctttaaagatggtcagggaagcctgcttcctcctcctgagcggggttgtgggggcctggtggcacttggtgatcctcactgaggccggggcctgctgcggggaggtccacccacttccgtggagggaatgattttccatgtgcacggagactgcgggtccaagctgcagtagaacccacaagtgggtcacaaaatcaatttagtgggtcaccaccacaaacacagtggactgggacagggcaaagcgcaccctgtgccatcaggctgagtctgaactcttgttacctatcctgtgtccccacccccttggcagccatgtaactaacctcaatgtgggtcgtagtcagaagtttaaaaaagactatgaatgctcttgaatttcattgcttcaggtaatgtttgaaatatgtagtcaggtggccaggggaggtttgctatctggaagttttcatgttagctattgctaaccccacccgcaagggcagcccagcctccaggtgtgggctctcctgtgctctgaattgtgtggctgtcctatgctggggacaagtggtaggagcgctttgtcccagggccaccttctggggccttcacacacatacccccaccacacaaacacacacacacacacacacacacacacacagtctatcatacatgtacatactcacacacaccacacagacacatactgtttggctaagggttaagtatctccaatattttattagccatccatcatggcagtttccagaataggctttctactgtaccagctgagctgccttcttttacttcttcttcttcttctttttttaaacagacagagtctcggcccggcatggtggctcatgcctgtaatcccagcactttggaaggctgaggcaggcagatcacttgaggtcaggagttcgagaccagcctggccaacatggtgaaaccctgtctctactaaaaatacaaaaatttagccaggcatggtggcatacacctgtagtcccagctactcaggaggctgaggcaggagaatcacttgaacctgggaggcggaggttgcagtgagttgagatcatgccactgcactccagcctgggcagcagagcgagactccgtcttaaaaaaaaaaaaaagacagagtctcactctgtcactctgtctggagtatagtagtgtgatcatagctcactgcagcctcaaactcctggattcaagtgatccccctgcctcagcctcctgagtaactgggactgtaaacatgacagccgcacttcacagttacactggggctggatgagtcaggacttttgctctcaaatctacaggtgggttaggagaaaactgacatgagctcagtcagagtttattgccaccttcctggtgccgtttcttctagccagctactgctctgggtttgaggagaaagggcctactcatttgcaatggctaagaagtgagatggtgctgccagagtgccgacccccgaatcctcaggggccctggcctctcctggcagcatccacccattctggttaccatgccagccctccagactatggctcatttgttcactagagggcttggtagcttggcagtttggggaaagcgggaggcacttcccaggggaagaccagagaagaccagcccccagccccacaaacttcctgcagcctgctggtgcagagggaactcttgccagtttactaccagatttcatgagatgttggcaggcctggggggcacctcagggagagtgcgttcccagccctttcattcatggtaaatgacacccctggggcatacagtgatgttaggtttttctctgaaacttctttgatcttttaaaaccagattcttagcatggattgagccagatctgttccttaccccctttttccaaagaggacggtgcacccacaattttaccataacatattgggatctcaggcctgaagatgacccattctttgtaaataagttggattttcctcataatatgtgtgggtttttttggtgggggaggagggggcagggttccgctctgtcatctgtcacccaggctggagtgcagtagtgcaatcagggctcactgcagctttgacttcccaggctcaagcaatccttgtgcctcagcctcctgagtagctgggactacagttgtgccaccacgtccagctaattttttctattttttgtaaagacccaaagcgttgggattacaggcatgagccacctcaacgggcctttattttttttattttaatttttattattattatttttgaaacggagtctcgctctgtcacccaggctggagtgcagtggcgcaatcttggctcactacatgctccactgcctcccaggttcatgccattctcctgcctcagcctcccaagtagctgggactacaggcgcccgccaccacatctggctaactttttgtatttttagtagagatggggtttcaccgtgttagccaggatggtctcgatctcctgaccttgtgatccccgcctcagcctcccaaagtgctgggattataggcgtgagccaccgcgcctggccccgggcctttatttttatttttaaccttttgacaagacacgctttctattagagctgctttttgtctccctggttcgatttcctgatgtagaatcattgtgttgctgatttttcagttgaaaatgtttaaactgcttcctttgagaacaagtttgagttttagtaagctgtaaagctgttttatttgattcactgtgaataagacaagtacaaaaaaaaaagtgaaaacacagcacatttcaagtgtaatcccctttggaatttttccaaagtcttagtatatgtctttgtgacagaaaaacatagatgggacaggtaaatgaaatgttcctagttgcatagctgttaaccatgcttcaaaaataaatcattttttacca

SEQ ID NO: 47 - DNA, 5937 bp, Artificial Sequence
  C11orf87
gaagcggcggcgaaggcggcggcggcggcggcggcggcggcagcagcgcggctcggtctctggtccattcactccacgctttctgcagccgccactgcagccgcgcggcgggggctccctccttgcagccagccggcggtccagcctggtgcctctgcaaaggaaaggggagcgtggagacgtgttcgaggtggtatcggcgaggatctctcgggcgccgctcactccttggtcgccttgcttgccagcagttgctcccttagtccttggctcgctcgcacaccccctcccgctacagggagcagttttgggtggcgtgggctccgtcctcttcttggctggtaggaacggtgtgcccaagaggggaagcctagtgggcctggcccctcccagccccgcgccaatgagtgccagggcgccgaaggagctgaggctggcgttgccgccgtgtctcctcaaccggacctttgcttcccccaacgccagcggcagcggcaacacgggtgcccgcggcccaggcgcagtaggcagcggcacctgcatcacgcaggtgggacagcagctcttccagtccttctcctccacgctggtgctgattgtcctggttaccctcatcttctgcctcatcgtgctgtccctctccactttccacatccacaagcgtaggatgaagaagcggaagatgcagagggctcaggaggaatatgagcgggatcactgcagcggcagccgcggtggcggggggctgccccgacctggcaggcaggccccaacccacgcaaaggaaacccggctggagaggcagccccgggactctcccttctgcgccccttccaacgcctcgtcgttgtcctcttcgtcccctggcctcccgtgccagggtccctgtgctcctccgcctccaccgccagcctccagtccccaaggagcacacgcagcttcctcctgtttggacacagctggcgagggccttttgcaaacggtggtactgtcctgatcgtctagcccctctcgttccccgtcctcgtttccagcatctttgccacccttgcttttttccttcttccttccttttccattttcctctggcccctctttcctcttcctggtttccttacctgccctccccttactcttgtttctcctccgccgaggcactgtgcggtatttgtaaatattgggcgaggaaagtctcggaagaagaaataacgctgataataatactttattaatatttatagtaattattataatactaataacacaatccaagcgcatgacaaatcacataatttctaactgtcaatggaggatgcatcttcccattccaccccgcgctcccctcaattaggaggagaaaccgcacaagctaccaaatatataaaaggcattgattcccggagcaaagggaggggagggggcccggtaatgtacatagctgtcaagttaagatttagtttccttccttcccctctgacccctaagctttcacttttcctttagcttccctttcctccccattcccaccctcagccgggctcaggcaatagtatattataaagaaaatgtctacattaagcaccaggactgcaagaggccatagagaatagtccccggaaagtgtttatgacaggtacccctcgccagtccgcccatttctcaccctttggttaaccattacattttccaggacagagcatttaatttactttttaaaatgaccctcgctggccgagcataagtacgttaaaatctttaaatgagttttttttaaaaagctaacgctttcattccctgccccgcccccacccgtacacctttgacttgtgacattttcaggatttacaaaggatctgggagctgtccagccaggtctggtgctgaagtcgcctcaccgttctgattacttcctctagttgtgaaggcagaggaggggctgttttggaaagtgactattctggcttttggttgggttctttcttctttttctacaatcgagttagcgtgtactattggttttcttattattaaacattgcataagttaccttttttgtaaaaaaaaaaaagtattaggtgatgtgcagtactgaaagtgcagtatctaaccaactagaacgtttgttttatttttagaacaagtgcacctttgttatatatttagtatattggtaccaaatacagaaaaaaactatagttctgtactatgtcctccaaactgtatattattgttcttaatttccagctgttgatataatggttaccactggatgagaaattcagtggtgcagacctggcttctgctgtttccagaagtgttcttttgtaccttattctgtagtagactgttataaaaagatgacacacacgctttattttttcttttgcaaataatagaaaaaacacaaccacagaaacaaacaaataatggatgtgcaagaatgccatctattaaaaacatggttaatatttaaacagtgcctgtagttctccctgcatgcagttaccacctggaggcagtggtgtgtgtgcttgcttgtactgtatgtggttggggatgagactggtggggatgttgggcaatttggatgataagacatgcgaatttcaagaaaagctagatccagtaattacttataggatacaaatgtttgcagcttgtttgtttagttacaaatctgtgcctgcagcaaaagaaaggctctctttctcagtctgtcctaacttcactgaacatacaaaaatactgagaaaaaaagaaagtgagaaaataagataaatattttattattttctaatgccagacaaggccatctatgttagaaatggaagtagtctatagttatttaccaccttgtttcctttggttgaatgacagaagaagccagaagcatattacaatattaattatatgcagtgacatctcttcttggaaatcaagcctttgacagctattcaaatttttggaaaatgtatgaatgaaagtgatctgcaaaaagctctaccaagagagtccttactatcctgcagggtgtaaggcaacagtgcccctatgagcatccctctcccaagcaactcattgttctaaattgtctacttggtccagacatatgtgctcttatccagaggaaacattacctctaatatttttggtcatctattaaattgcccaagctcagtttgcatcttttataaaaataatttaataaacttaattttaatcacccataagataatcacctttcctgaagcacagaagatcatcattgaagcatgccatcttgtaatattaggaagaccaggtataatctttgggtacaatatattaaacaatgaaccagtttttctccagtgccttagtcacttcctagtaataggtaaaagagtgcattaactccctcaggccactagggaatcctgtagtgcatcagagttctacactgtacatcagaatgactaaggcactgtgaagaagaaagtccattgatttttgtagcttaccctcatccagtggtagctctttaataccttattacagaatgacttttggacttgaaatttgaatagaatcagggtcccagaagggagcttcatcatttccaatgagctccaataagtgcatggatattactttctttcccttatttggtgcactttctacagcgaataatttcccattttattaaagcaataagatgttctgttgtgagcagtgctggataacgattccattttcttggtgctgaagctacgcatatgttcttgccttatgaatcatagtatattcaaggcatgcaataataatccccttccaaggagcagcctgtacactctgtgggggtaattatgaaattgtcctacatcatttctccccaaaggaatgcaaggagcaagagaaataaaagcattatgtatattgtaaaacaaatgatctcaatacctctcaacgtgggcacacatctgtaatacacttttattgtgcaactttaaatgtgtgtgcctttctccattaattgactgtagtttaatatttttaatagtgctctgtgtaaagatgatgcagtttgtgagtcagatttcatactgagcttaatatactcaaaacctaagcttccagtggtattacttgtgatttttttatgagatagagaattacatgaaattctagtaatccagtttccacacaaaattatttcaataagcacatatccaagcaatttgtacagaccttgtttaaagcactgcttcttatagggctcaattggcagtctcaggagcttgggatgctaccaacagggcatttaggttttcatttttatgaaacaaaaggcaatctggaaatagctaaatttattttaaggattttattcactgatgtcccgtcaaactaaatgcttcaaacccctatagctacagcttaacttctgcacttgctattcagtattaataaggtggcatgcttgattcttattgtttttaaaaatgagaaaatttggagagagaatactattatgtcaacggtacaagactctgaatcttgaagatgtagatggatataatatttagactttatatacacccatagatatgtatttatatatgcatacgttttgtataaatttacaattgactttttgtattctcttttctgtcattacaagaatgagatggaaaccaaaatagttgttccatcctcttacccaaagaggatactgaaaagtccggtatgtgcatgcacttgtttctctggggtcaaatctgaatgactttctctttaataatgaaaggggagagtcctggttagcttggaaaattggtaattagataagcttcctttcctaggttagtgactcaaatgtagcaatgataataaagttatgaccatatcaatgtggtctaaatatctagatggaaagcaaaaatatccagaagaggtttagggccatctagaccacaaacctggaacctggattgtggtttgatttttttcattttcaacctatatgttgtgtagaaatacaatttatatctgcatagctaaaggtaaagtgaaaatatgaccattatctgtttagtttgagaaatcatttttggataatatggataaattagctttaagaaacttctttgacatctgacttttccaccatttctatctgtatcaattgtattaattagataatggttaaatttttatttttttatcatgtagacatatgctttcatgcttttctgtgggtgaaagttgaacaattgctagctgatattatgtggaagttacaggttaaagtagaaccagaaattttaatataatctgatcaggttccttagtcccattcccatgtgaatctgaactttgaatttgaatctgaaaggcctacttatttgggccattttttgttggaacttgtgattgtaactcacagatgtttcagttcatattagaataaattgcccaatctataagagagtgtttaatcattggaatgaatgtaaatctgattctgatttggttatttatttgataacatttgagaaacagctaatgtggcttgacatcaatacttattaatgtcttcaacctaataatacaattggtgtcatgtatgaatgcttagctgacaataagaatttaatcaactttatttggagacaatgacttatcaaggaggtcctacccatttgtggtagggatatttcccttacagttgtgattacaagggattgtttctatagagagatgaacagcaacaacagtgacaatgatgacaacagaaaaactgacttttgaacttgagtatatccaatagatagaagaaaaaagatattagaattcatggaaattttgttttgcttttctatcaataaaagagttttcttgttaattggctttttggacactatttccttgccaatttaatgtacaatataccaggat

SEQ ID NO: 48 - DNA, 3042 bp, Artificial Sequence
  ASB5
accagctgatattttctttcctcaggaccagctgttcaggagcatcccggacgagagccaggcacatttgagacttggatccaactaaagaccgccgcagattcttctgcagcaatgtcggtgttagaagaaaatcggccgtttgctcaacaattatccaatgtctactttacaatactttcgctgttctgttttaagctttttgtgaaaatcagccttgccatcctcagtcatttctacatagtgaaaggcaaccgcaaggaagcggcaaggatagcagctgaattttatggagtaacccaaggacaaggttcctgggcagatcgatcaccactacatgaagcagcaagtcaaggtcgccttcttgctctgagaacattattatcacagggttataatgtaaatgcagtaaccttagaccatgtcaccccattgcacgaagcctgccttggagatcacgtggcatgtgccagaactctgctggaagcaggagctaatgtaaatgcaatcacgatagatggcgtgactccgttattcaacgcatgctcccaaggcagtccaagctgtgcagagctgcttctggagtatggtgccaaagcccagctggagtcatgtcttccatccccaacgcatgaggccgccagtaaaggtcaccatgaatgtcttgacatcctgatatcctggggcatagatgttgaccaagaaattcctcatttgggaactcctctctatgtagcttgtatgtcacagcaattccattgcatctggaagcttctttatgctggtgctgacgtacagaaaggcaaatattgggatactccattacatgctgctgctcaacaatccagcacagaaattgtaaacttactgctagaatttggagcagatatcaatgccaaaaatacagagcttctgcgacctatagatgtagctacgtctagcagtatggtggaaaggatattgcttcaacatgaagctaccccaagctctctttaccaactttgccgactctgtatccgaagctacataggaaaaccaagattgcaccttatcccacaactccagctgccaacgttactgaagaatttcttacagtatcgataaaacagtaaagtaattctaaataccttgaaaatcaaaatttctatttcttttgcttaaggaatagttcatataaaaatatgctaaagataggataaaagtgagtgtgagatcacccagggaagcagtaaaatatcaattttcattttaagtgtattagtactattgttttatcatttatgctgtctttggattatagcatatttataatatctattttttgttatttcaatataccctcctgtttattcaggaaaaaataataaagtcactatcttatgttttcttttggattggaaagaaataaagctcctagtaaagttattcatattatatttaaaaaggtctatgttcttcaactaatgggttaactttttaattttggctattgtaattggctaacttgttactgatattgacataaaatatgaatatggcttagcaaagagcaactaatatgttttctgaaaccaggatgatgctcattcaggaaatccactatgttgaatgtccactggtcattagaatgaacacttcataaagataaattgcccccctctcccccacttacccctggcaaaggactcacaagtcacttctcttctccatagtacatggacttgttacagaaaagtgataggatgaaaggtcaatactgccctctcaccctgagatatttagaacattacacaccttctaaggctatgttaagactgcctccttctcaggagtagcccctgatgatctcttatcaaggcggttatatgcatattactccagccttcttccatttcagaaattgtcaatagctagtgatacttggacttaagaaaatgaactatatatctaattaacaaacaggccctggatcatattccggggatcatcacatcagtccaaggatataaaaaaatggaagattaaaaactcaaattgtggagtttttaaagagtgggtgccacttaacacattggagaccttaaaaaatgtatatagagaacttaatcgcactgtttctaattctttttacacaaaacaagggcttagagtatactgtatttgcaagtaatagcaagagagtattgtataaaagaagatattactaagctagtcctctgcaagggtaaatactacgtttattctcttcagctttaactatacttgagtgcaataaaaaacttaataaaattttatgcctgttttgtaattcagggcctattatgattttagaaataagataatcaacgtacaactctttgtaaaacaaaagcaactttgggtgagttttatagatttattaaattttgataaagtaaatattttgaccactattttcaacaacccagggcttattttcttctgacttcttggctaacttccagactatgggaaaataaattatgattgtatgtgacccccagatcactaagcttgcattttggcagaaagaaaaaaaatcagttgtgatttaaaacgtttgttgagattttcaaacatagaaataaagctgtagcatattcactaaacaatgttttatatgaggatagggacctttaaatatgtgttttatagaatatctcacacatttgtaatggataacgtgcattaaaatggagttcttattatagaataacctggttaaacagatattaaagctgcttttgggtaaaacaggtttccaccagtattttccctgagctagaggagaagtcttagattttaagagtaatacaacccatctatcttattagtcttgtgccaataagagaagtaaatatcaaacattaaaatggtcactttacaatttcagtatgtctgtaccttgtatcttagcttgagtatgattgtcttatcaaagtagtgttctaactttaatgtattgtatgtttgttattatattaaagtgtgattattattcattggaataaaaaaaaaaaaaaa

SEQ ID NO: 49 - DNA, 621 bp, Artificial Sequence
  LINC00944
cttgccgcagcacactctctaatcgagctgtaacactcgccactgccgtccacggcttcattccttgaagccgtgagaccacgaacccttcgattgagaagaaccttcggtcggaagaagacttctcgtctcagtaacaataacaagaaaaacagcctagactagacgcacatcaggaagacagttaatcccgtcatgtattgacccggaaacatcatctcatttgcctataagacagagagagagaatgatagaaatgctggaagaacgagccttggggcggtatcgcccagatctgaatccacacagcagctgcttcggtccctgtaactcaaggcttcctcttaatcctctgtcctccatcaacacctggctgagcaggaacaactatgacctaggaccagggccttcaggaatcttcacccctaacttgaacttcataacactggagagagagactgtggaatggaatgactctccagagctgcagattgaaggcatattttcatctgactttgatctcaatggcgggaacaccttcatggcccctttatagctggtatgttttcttcttatggacaatgagaaacatgtaataaactgtgtttccttctcgctagg

SEQ ID NO: 50 - DNA, 2348 bp, Artificial Sequence
  RNF144A-AS1
acgccattctcctgcctcagcctcccgagtagctgggactacaggcgcccgccactgcgcccggctaattttttgtatttttagtagagagggggtttcaccgtggtctcgatctcctgacctcgtgatccgcccgcctcagcctcccaaagtgctgggattacaggcgtgagccaccgcgcccggccagttcaatggattttaaaaattattattctctagaaaaaagaccacgaactttggagtggacatcctgagacctgcctacgaagaccattaggtggcctccagaagacactcccctgattcctacaccgagggaacacacagcagcaagctaggaaagaaggggtgacccagcccaacgctgtaaaccagggcgcgaaccggcgttgagctgtgcagctgcgccctgggctccagtcctgctctgccgcagaccccaccggagccagcacctgcctccccgaccctcgctggggcggctgtgagatgagcccagagccttcctgagccaaccctcgcaaggaaagtctgtctgttcaccccactatccttgtcttgaaggatgaagaaaagagggccccccgggaggtcccaaaaggtggaatggacatctgggatccaagcacagcaatttctttatttttcttaagcctctcactagaggatgaaaatcgttctgcataaaggcctgggctttatgaaaaatatattcacacctcccgtgtccgagctgggataccaaagaagttcctggttgagtactacttatgaatgaaggattcaggggatgcacaggacacagaggaatctgggggatattatggttctgggaatgtggaatgtaacgtctcatcttcagcccatctgtgctactgatcatctcattccagaagccatgccttctctcaggagcagacagcacaagactttcctgccagaggcacagtccccagtgggagtagcatccacataagacaggatgcagagatgtcttcaagcagcttcaaacaaaacttcaagaaagaaagtgcaagtgaaaaaggaaattcatccttccagtcacttaacacagcactgtcacggacaccttgtgcctccttaaaattcgtatactgaagttctaagccccagtaccccagaatgtgaccttctttggaaatagggtcattgcagatatgattagttaagaggagatcatactggagtgggctttaatccaatatgactggtgtccttatgtaaaggggaaatttggacacagacacacacaaggagaacaccatgtgaactgaagtcaaagatttgggtgatgcttctacaagccaagaaatgccaaagatgaccagcaaagcaccggcagctggtggaggagcctggaccagattcttcctcacagccctcaaaaggaaccaatcttgccaaagctttgacttagacttctagccccctgtgatggttaatgttaagtggcagcttgactgggttaagggatgcccagatagctggtaagacagtatgtctgtgtgcatctctcagagtgtttctggacaagatcagcatttgaatccttagagtaaagaagatctgccctcacccacgtgcatcaccctatctctggagagcgcgaacaaacaggaggaagggcacatatgctccttctgttccagctggcacatccatcttctcctgccccctgacttcagagctcctggttctcgggcctcaggattccagcacttacatgagagcgtgcttccccctccctactccacccctaggttctccgccctttggcctctgactgaattccaccaccagcttttcagggtctccagcttgcagacggcagatcgtgggacttcttggcctccataattatgtaagccaattcccataataaatctcctatctatctatctatctatccatctatcaatcatctatctagtctatctatctatctatctctatcctattgattctgtgtctctgaggaaccctaatacacctccagaactgtgagatgatacatttctgtggtttaagccactcagaaggtggtactttgtttcaccaggcctagcaaactaatacaagtgcatggaaggtgactactcatgactgcaacttagagaacaagggttataataaaaataaaagtgttatacaaaggtggcaagataaatgacaataaatgaaaatattaacatgtgaattaaaaagtaaagatatttttcctagcattctcccagaaagtagagacgcgtctctcttgtttgccatcatatccagcaatggcaagataagttctaggcacttcataaaaatttgttgaatgaaag

SEQ ID NO: 51 - DNA, 3137 bp, Artificial Sequence
  UBE2Z
agcaccgtctgggctgtggaagcggagggggtggggacactctggcccggttctcggtggtgcgggagcgggcgggagcagcggccgctctggtcggcggacgtgctgccgagtagtcccggaagcgaagcagcgatggcggagagtccgactgaggaggcggcaacggcgggcgccggggcggcgggccccggggcgagcagcgttgctggtgttgttggcgttagcggcagcggcggcgggttcgggccgcctttcctgccggatgtgtgggcggcggcggcggcagcgggcggggccgggggcccggggagcggcctggctccgctgcccgggctcccgccctcagccgctgcccacggggccgcgctgcttagccactgggaccccacgctcagctccgactgggacggcgagcgcaccgcgccgcagtgtctactccggatcaagcgggatatcatgtccatttataaggagcctcctccaggaatgttcgttgtacctgatactgttgacatgactaagattcatgcattgatcacaggcccatttgacactccttatgaagggggtttcttcctgttcgtgtttcggtgtccgcccgactatcccatccacccacctcgggtcaaactgatgacaacgggcaataacacagtgaggtttaaccccaacttctaccgcaatgggaaagtctgcttgagtattctaggtacatggactggacctgcctggagcccagcccagagcatctcctcagtgctcatctctatccagtccctgatgactgagaacccctatcacaatgagcccggctttgaacaggagagacatccaggagacagcaaaaactataatgaatgtatccggcacgagaccatcagagttgcagtctgtgacatgatggaaggaaagtgtccctgtcctgaacccctacgaggggtgatggagaagtcctttctggagtattacgacttctacgaggtggcctgcaaagatcgcctgcaccttcaaggccaaactatgcaggacccttttggagagaagcggggccactttgactaccagtccctcttgatgcgcctgggactgatacgtcagaaagtgctggagaggctccataatgagaatgcagaaatggactctgatagcagttcatctgggacagagacagaccttcatgggagcctgagggtttagaccctgctcccatctccccttcccccactcaagagtcccagcagaatcccttccccccaccccagggatggagaggcactgtgtatctccctccagactcgaagtcatcctgcaagatggcaagaaccaagcaagctccgatcccagggtgtgggagtgggggcctgttcccggtctgacctccttggcactggagcatctggggcttcgttcatccattcatcccgtatcaggggccaaggtacctttacaggagcacctagagcgagggcctttggcaaaaacaaaacaaccaacacacctctccacagggccagctccttagggataagtggaagatggaaattgcaattccaagagggagtgtgcccaaatgatttatggggatacctggaagggagcttggggtgggggctgtctgtgacacttaagcagtctgggtggttgtctatttgtctgtcttcagtcttgaagcagggcttcccaatgcccttttcctccctgccttccttcccccattatttcccacaggccagcataattttgtttttcctaatttatagtcactgttctagacagaccaaagagaaggaacagtggtggagtctaggctgctgatcagtaagctttacctagcacctgagcacctttctcccctcccctctttcctcacccttttctagatgtaagacagaaagtaaatgtgactgggacttaaccaaggtcttggtaaagcctgcatggcaccgtaagaagctgaaaatactgtttgttcccgcaatcactgatttgaaaagttcccaacacaggcagctgctgtgtatatgggattagagccactacatagaatagtctcttacagattttcataaatactagtcacaataagggtatttttcttgggggtggagtaagggggagactgatgctagtccttgttgtattttgttgggctgtccttgtgtattttcaccccagcctgtagtcctcctcacttcaaccccagggatttttggggagcaagggtagccaatggcagagggggttggggctgggactctggaggctcctccccttctttctcttccttccgcctcccccgtgcccccagctgctcttgtcactgtctctgatgggtatttgcctggctttgttgcttctctatctgtatttagctgcagtgatcctttagctggttggctcagaaaaaaaaaaatgtgctttaggtgccctgtaatcctgggcatcaagggaatccatccttcccctttttgatatgttctccccgtacttccagatttattgttatggctcccagtgggtattggcgattcttgtgatgcagggcctcagtcagtgtccagccatgcataagggagaggatagtgtgtacctgccctgccctctgctatgaaggtctctgccttgtggatcatgggactccccttggaggatctgtgcaaaggggggctgggcacaaaggagaatgtcctatttgggagggcaggaagcaaaggaactggacagggattggtgggcttggggaacggaagtttatcttggatacccttgaagaggctgggtctcttcacatgaagatcgaaaagggaccctgcttccaatttccctcttccattcctcgagctactccagggcttagaagaatgctcttggtctgtgggtccagtgttgtctgtcatccatttaagtgttcccactttcaagtgacaatcctctccttggccctgccatagggcagagcatgtctggcatagcagcctgacttttatgccctaatcttgagttgaggaaatatatgcacaggagtcaaagagatgtctttatatctgactgtatataaatgaagtttttttgttttttttgttttcctttttggtgcaataaagtttgttttggcagaaggagaaaaaaaaaaa

SEQ ID NO: 52 - DNA, 1821 bp, Artificial Sequence
  UBAC2-AS1
gcagtcaggggcgtgcgcccgctgggtcagcgccctccttcctgccggggaagggaagtgcgtcggtaggggagggctcacctctccaggttgaaacgatggcggtcagaaccgcctgaggtaaaaacgggtggcactggggaagcggaggcgtagctcccgagagcctcacacttgtgctcagtgccgcctcacccctggtggatccgcgatggccgcggattcccctggattgccggcgctgggcaggagcgccacttctaatctctcccgagactggacgcccggcgccttccacgcgcgttgtgtctttccgggcggtccctcgaagctggctaccccgcgggctgttgactgcagtgggatctggtcactcagatgcggatagagggctaaatgcaagatggtatggcatccagactctgctcataagtatctgcagtgatccataccttgattgtacatctactctgcatcctgaggacctgaacatgctaactggtggctgcagatttgtcttctaaggagcaagtgtggtctgtggacaggcagcttcagcctcacctgggattttgtttgcactagaaagtgccaagccctaccctagacctattaaagcagaactggcgtttaacaagacaccccaggtaatttgtgtgcaccttagagtctgagatgcactagtgtagtgattcgcagggggacaattttgacctccaggggacaatatctggagacatttttgggtgtcacaacgtgctggggagagggtgctactggcatctaatgggctgaggccaagggtgctgctaaacatctggcaataccgggccaacctcccccctcctcctgcccacagtaaagaattaccccgcctggattgtcagtagtgcagaggtagaggaaaccctacacctgtgaaactcatctgacctttactatgaattcctggatctcctggtgcatatcatttctgttgccctggctgacatttccaccttttctcttttctagattttattacaagaactcaatctgttggtctctaggaatcacctattgccttgctatgttttgttgaacctgtttttgaatctgctttctacattggggaaataggtatacgtttgtaaaccttaaaagctctgtatgctataaggaaatcaccagacacgtggataagctttgcagaggtgaagggctgtctccaccagagagacccagaaggagtcagggtaagcctgactcatcatgagatcaggtatccccaatccacagcggacttccacagttcaccttcctaggtaaccgctctgccttcccaggtaaagtaggaataatatcagaacttacagcatattttgaggtcaaattgtagaatttggtgatttcatttttattattactcaaccttttatttacaaccaaattaataaggctacttacacataacaatgtgtggacatacacattaagagaatcatttgctgcctagcactcctacctaggtactttaagaacatcattgagtggatactccctctgctgggtaaaatactttgccacaatatcagctgaaatgatacctcttccagactgtaatggcagaagtagttatcccctctttcgtgctgtcatcacacttgatgcatgcctactttataatacttatgccattgtctctgttattgggtttctgtcttctactgtgaaagggtgagcccataaaaaacagggaatgtgtctttcaaaatgttgtatcctgctcattctgatgtgaagccattgtcctccttcaataaaataaaacagcatttctga

SEQ ID NO: 53 - DNA, 4873 bp, Artificial Sequence
  LOC100506965
catttagcaaagattgttgaggaaaggaatggatggaaggggccagctgaaagaaaaagtaacaacctaatgatggataagtgaaaaaggaatgaagaaaggatggtgctaggaatcgagggagtaaagcaagatagaatgtacaaaaggtcgaatttttaaagaaagttgtagggcaagggcaaggtctggtcttgaactcccagactcaagcagtcttcctgcctcggcctcatgcccgcgccaaccagttctttatttttaatattatgttgtatttgatgtgctatcctattcatttagtataagcacatttttctttatgtcttcagcataattatatgctttttcagaattttaacatcaggactgcttccagggtagctttattgccctttgtcttaagtatggattatagttttcattctttgtatgtcaagtaattttggattgtaacttgaactttgaatatactgtagaaactctgaattctattttattcttctaaaacaatatttctcagcttcagcactactgacattttgaactgggtcattttgtttgtgttgttgtgtgtattttgggagggtactgttctatatgcattgtggggtactgagtattatcctttgtctccactcactacttaccagtagcataactctctctcctccccacatcccctgccaaaaaatgccttcagtcctttctaagcgctcttttttatggtgttggggccaaaatcatgcatctttactcactctttctcattgagagctatggctataaagggtagtgatacttttacttatttatttttaaggcaagcagttaacttagctggattcaaactccaggctgcctcgtgtgctgtgggaagcagcctacgctctattcagttcttttcttttcatattggttgggttactttgagtctggcctacatgatgggcagtttagaggtcaaccaaaggatttcagcagaacttatacacagaatttcattcaggcttcccgtgtctgattggctacagtgtgggaatttcctcccacttttcagccactactgaggatgcctttcggcaaaattccttgaaattggaaacttacagggaaattcctttcctccaagagtgcgctctcctccagtgttggcttgcttttggttgttctccgtggttttagatagctgtctttatattaattctggagtttacagttgatatctgttgggggcttagtttgataacatgtattcttctattactagtagccagacctgtatgtcttacttgacctgatggagaaaagtttcaacttatgagacaatactgtgctagctagttttactgatttgtactctaaagtacccaagcctaaaatagtagagctgtctatcccacatgaaacttctctgattttcactgttttttataaaaagtatacatgttcacatttctgtaggtttttttaagcatcacaatttttataaactttctatatttccaaggtctacctgctttgtattttgcctagtgagagttttgtattcatgtaggaataatctcttggtgtgagtatctattttccactcatccaaaacagatagagcattgatttcactaagcgttatgttctagtttgctttggtattattattagaaatacctggtgattaatttgagctaagtattcttctctaccctcattcccagcattatcacccgcttttaccacttccaaggggtggaagcattctccacaatgcattttttcatgccagagaaaaatctagaaaaaaatgaataaaacgaagaaattctttccccttggtatctgtagctaacttgcctaagtgttctttcccacagtttaagtcttcagtccatagttcataagcaaaggggtgtagcgagctctgatcttgccagaagagagaataagtgagctaccccacggtggacattctggccatctgaaatgagtcgatgcatgtggcttttgtctaaaggctacaaataaaatgtaaccactttcttctttgagtagttgatatagcaaatagttgaaacagaagttttgattggcaaatcaggatgtggtagatactttaacaaagagtagaactattaccagttttatgtgttgctgtttgtatctctttcacagttttgataatatcacatcctggaaagtgaaacagaaaattattattccattttaaatgactaaatttgctttcatggtatttacagtgaaagagtaaattagaaagtgaatggatgactgttcatgagaaaaagcagggtaaaaagattttatttaattaattgaaaatattagggtcaaaacataggcttatgttatgttttgtgaattgtgctgtgttgtagacatttgatgagtcctaacatagaattgatctagctcttgaaataccatttttgattgagtataaatgggatataggcaccttacaacttcagaattcgaggaagatgatgtgaatcttccaattttatctatttgattcaaatggtatgttttttcacatttctcataatttccacgtcaactcccatgatgatcatgcaggaaagcagcatgattgcacttcttgtagtgcataccatcactaaaacatagttactgtctttctgtggtcttaagaaaaattcagaaacagcataccaatgtacatataagataaataagcttatgtggtacagtaagtgttctgttctgagaaataccttgattcgtatcctaatgtctgatgttattggtagttctcaaacttccccaattctgctttcatctaaattcatcttatctatctattgttaaataatctatcagtccatttttatctatcatctatatatctgtctttatcaatcattcgtctgtaatctatctgtgccgtttggcataagagacagaagggcatagcagtggaaactcaaaggagttacctccatgtgaatggacagtggtgatggtgatctgtgaggtggtgatgtatagaaagaaaaactagaagagagcatgccctaactcagggaccttgtccagcaggcactctggccttgttatactgtgcttgaatatgaaaaaaaaaaaaatcaaaatagtgctgacattctttgtcttctgggtctgagaaaacttagagtagatatgatgactctgccatttcagtcttttgtatttccacatttagagctcagttttaattatgtagaattatttctccagcctgtgttaaactagaccatggattggcaaactttttttgtaaattgccaaatacacattttcagttctgaaagccttgtggtctttgttgcagctaatctactctgctgttgtgttatgaaagcagccataggtaatttataattgaatgagtgcgctgtgcctttcttccaataaaactttacaaaagcatcctgtgggctggagtttaccctttgggaaaccagagcattggctaaactggaacctgaaaaaataatcacatcaactcagccacatggtaataatatttagagtattatttcaacattttcattttcataaaaatttttttagctcttttgccaaattccatctgtgagtgatacaaatgactaccacgtgccattaacatcacctaaacagtgcaaaacaagcatagtagaagtaattggaatgatataaaccccttgctgtaatagttatagttgataaattatgtttcaaaattgaacctatttcttccaaatttcatctataaagttccaaggagttccaaaatcttgcctgccttcttttcccagttagcagtattgtctctgagcagccatggtggtatccatcctccttggacaatgaatttagcctattttgacttcatttgagcagttgtaattgtttcaccacatcagagtaagattactacatgccagagctattctttaactcagcttgtaaaaacatgatagcatcaacaatatacatagcaaatgaatgccatctttaatccaattaaatggtttttacaaatttgctcttgtttgttgatgctatctgcattgcagtaattaaaggtgaggtaaaaagaatgaataaactgccaagttaaaattaaatttgggcaatttctcttttgcagtaatgtatgtatatttactcaaaacatatgccaaatttagtgttgaaaggctcattcaaatcaattgggaaagcacgtaaatgaacaattcataaaagaaaagcattgcaaatggccaagagcatagaaaatgtgctcaatcttaccagtcattataaggaaataatgaaatttgtgtatatatgaaatacttaaaatatatataaaataaaacaattatttgccttttttcacctatcagattaacagattatatgtgttaacaaggtggggagaatttacaactcctgatatgttaaaatctttcaggaaggtagtagaaaatatatgtaagatggaaattagcacttttgaccaacaattttagttttagatatttacctataaggatataataggaggtgttcaaagatgcatgtaactcaatgtagtattaattataattgtaaaatagtaaataacatttttgtcaaatcataatgttaggaaaattagtgatggcacatttaaccaattgaattatattcagttctgaataccgtgatgcatgttcaaattaattgatacaaaaatccaacaactttagcagtttgtttaccagttattgagtaccaactgtgttcaacattgttatttcactcatatgaaatgataaatgtatgtgcgtgttatgatacggtcaataaaaccacttttataggaagaatactcacaaaa

SEQ ID NO: 54 - DNA, 1061 bp, Artificial Sequence
  BRICD5
gcctcccagaccctgagctccagtctgcacaggccaggtgtctggagccgggcctggtgacaggcatcccccaggtgggaggaggggctgtcctggctctgacctggatatcagatccagagctgagggggaggcgcagggtcaggaggggaggggttctgttctgagtttcccctggccaaggctgcagacaagggacgcagacaatcggcacattgtgagcaggggctgcaggatggaaccagcaagctgctgtgctgagcgccccaaacctgggcctacaggggtgaagaccaagccctcctgcgggggctggagagccgtgagcctgctcctgctgctgctgctgctggtgctggccgctgtgggggttgtggctggagggcttcttggctctgctcagggccctcccaagccaaggctgcagacgctgcgaatgaccctcccgagcccccacatgccccggcccaaccaaaccatcctggtggacgtggcccggaacgcggcgaccatcacagtgaccccacctcagagcaaccacagctgggcggtgctgttcgacgggcagagcggctgcatctgttaccgccctgaggagcaccaggtctgcttcctccgcctgatggaggacagtgatcgggagaccctgcggctgctggtggatacctccaaggtccaagaggcttgggtccccagccaggacacccaccacacccaggagctgctggcagtgcaggggagcctcgaagtggaccccgcccaggcgggggctttggtgcagcgcctgtgcatgaggacccccatctactgggcccggcgagcagaggggccccggagacagcggctgatttatctctgcatcgacatctgcttcccgagcaacatctgcgtgtcggtctgcttttattacctcccagactgagcccccgacctggcccagcctggcccgtccccaatccagtgggctggccaggccacctgcaccagggaggacagctgctggcagggactaataaacccttccacctggcaaaaaaaaaaaaaaaaaaaaaaaaaaaaaa

SEQ ID NO: 55 - DNA, 1122 bp, Artificial Sequence
  DSTNP2
acgctgcccagactcactacccgccctctcagtcccgcagccacgaggaggacgctgcccagactcactacccgccggctccctcccccgcgtccctgtggtggtgggcgaagatgacctgttgtgcatcagatgcctttgagacatacaactggagatgtgagataggaaattgaatgtaaagactggaagctcggcagagcagaactctgaacaacgtgcctcaggagtgcaagttgctgatgaagtgtgtcgcattttttatgacatgagagttcgtaaatgctccacaccagaagaaatcaagaaaagaacaaaggctgtcatttttttgtctcagtgcagacaaaaagtgcatcatgtagaaggcaaagagatcttggttggagatgttggtgtaactataagtgagcctttcaagcattttgtgggaatgcttcctgaaaaagattgttgctatgctttgtatgatgcaagctttgaaacaaaagaatccagaagaattgatgttttcttgtgggcatcagaactagcacctttgaaaagtaaaatgatctatacaagctccaaggatgcaatcaaaaagaaatttcaaggcataaaacatgaatggcaaacaaacggaccagaagatctcaatcgggcttgtactgctgaaaagttaggtggatcctttttttttttttttgagatggagtcttgatctgtcgcccaggctggagtgcagtgacaggatctcggctcactgcaacctctgcctcccgggttcaagtgattttcctgcccagcctcctgagtagctgggattatagcgtgcgccaccacacctggctaatttttgtattcttagtagagtcagggtttcaccatattggtcaggctggtctcgaactcctgacctcgtgatttgccctccttggcctcccaaagtgctgggattacaggcgtgagccagcatgcctggccagtggatccttaattgtagcctttgaaggatgccctgtgtagatcatcattcagtgccacaaattgaaagcttccacgtttaatgttatcctcttgctatataaataaagcaaatatatttaggccagggtctcactgaaaaaaaaaaaaaaaaaa

SEQ ID NO: 56 - DNA, 1675 bp, Artificial Sequence
  MAMDC2-AS1
atatcgggggtgcactggcacagaggaaaggccatgtgaagcaagaaggcagccatctgcaagccaaggagagaaatttcagaaggaaccaaccctaccgacatcttgatcttggactttaagctgccagaccttttatacattttctacagaaaatgcaccccatcattgcttatagcccacccacgtggactgctcattctgtgaatcatgttttacagatttgtttatgtggcattcctcgtttgaataaagcagaaccaaatgtcttggtttgaagattgagatgaaatgggagggccacaaatagtaatttatctttgagcatcgtatagataaacatgtaacctgatactaaacaaaagtaaatgctcatggactgtcagtgatgtggtgggatatgccagagggaagtgatttgtggactcactggagagagacttctactagaaaaattgccttgatgttaggaattaaaaaaacaaaacaaaacaaaaaacatggagccgtattctccagaagcttacatctgatttaacgagacaggtaagtacaatttcaacataatgcattaagtgctatgagagtagtatgatggtgataggtgctatacaagacaagggttctaggttaattgctttgagaaaattgccaccctttaacaaggttaaactggattctttaacgtcaaccttactgagagtttctaatatgtcactgtgctttgtgaatcttcatgtgtgtggagtagagatccagtctgccaagttctgcaaactcatctgacaacagaactctttttcaatggaatatctcaaggcatttgtgctccacgagacataagatgagaagggctgacacaagattctcacctagtgaaaaaaaaatatgtatttatatttttaaaaactggttggatgggggctttctcccaaatacataaatgactttgaagttttttttttcagtcctatgacagagtaaagatgcagacttaaaaggatttaccatgaagattttaatgactgctgggctgattattaagcctgatcccagtgaaatggaatgcctttagtcattttcatttatggactgtttaacgatttttctccaaaagaaatatttaatgaacacaatatcgagttcctcccagtgcttctaattaacagaccactgaacgatctttgttaaaggaaaggctagcttcaggccagaaggcgttgcaggatctaatatgtatgctaccatgggtgaccaagcataaagataaactaaggatttgaatatataagggctaatgtttgtgtccattgttatggaatttctgacaatcactctctagtctttcctaatatttggcctttaggaaaagtgttttggactgaattgttctctctcctcattatcctccttaatgtgtgaaagtctcaatgtaactgttgattacctgctctctatttcataaagaggaaaaacagatccagaggaccatttcatgattcatcctttttcaaaacgtttcttaaaacattaaataaagttttattattgtaaactgttaaaaaaaaaaaaaaaaaaaaaaaaaaaaaaaaaaaaaaaaaaaaaaaaaaaaaaaaaaaaaaaaaaaaaaaaaaaaaaaaaaaaaaaaaaaaaaaaaaaaaaaaaaaaaaaaaaa

SEQ ID NO: 57 - DNA, 2604 bp, Artificial Sequence
  MYOZ2
atatagccagttgatgtcagctgaatgccagtctcttcagaaaagctcagtccccagtttgagtcagagtagggaccatgctgtcccaggttcaaggataaaaaccatcaggcccaagtgccatccatagtccatctccagagtcttcctccacaaactgggattcatccccgctgaaaaagcacaatctaacagcaagggaacaaaaaaaccatgctatcacataatactatgatgaagcagagaaaacagcaagcaacagccatcatgaaggaagtccatggaaatgatgttgatggcatggacctgggcaaaaaggtcagcatccccagagacatcatgttggaagaattatcccatctcagtaaccgtggtgccaggctatttaagatgcgtcaaagaagatctgacaaatacacatttgaaaatttccagtatcaatctagagcacaaataaatcacagtattgctatgcagaatgggaaagtggatggaagtaacttggaaggtggttcgcagcaagcccccttgactcctcccaacaccccagatccacgaagccctccaaatccagacaacattgctccaggatattctggaccactgaaggaaattcctcctgaaaaattcaacaccacagctgtccctaagtactatcaatctccctgggaacaagccattagcaatgatccggagcttttagaggctttatatcctaaacttttcaagcctgaaggaaaggcagaactgcctgattacaggagctttaacagggttgccacaccatttggaggttttgaaaaagcatcaagaatggttaaatttaaagttccagattttgagctactattgctaacagatcccaggtttatgtcctttgtcaatcccctttctggcagacggtcctttaataggactcctaagggatggatatctgagaatattcctatagtgataacaaccgaacctacagatgataccactgtaccagaatcagaagacctatgaaaagaaagttgtatgtgccacataaaactctgaatataaaagttgctgttctactattttaactactggcaaagccacttgcatttttcattagtagcaacaatagcaatttagtgattttccttttctgacattcaatttcaatctcagatcaaatactaataaacaattagaaatcttactttaaaaaacttataactcacttgtcttcattcataattttgttttcacctggtttaaagaatccagatattttactgcaaaagttcagatggaaaagtaattgacagtttcacctttgtctcattttatatgatttattacagtgtaagtttttcaagtggaatctagaatcaaaatacagggagagatatgaagacctattcagagtttcatctggggatgaaagctatggaagatgatgtacaaatgttattgatggagaaaatggttgggtgtgtcctttctggtgaccatgagaaaataatatgtcttgatgaagtcttttcattagtcactcttagaattctaaagtgctttgcacttttcaatatgttttgaatcattaggtaatttattctggatgatattctccaaaattcaattcagttattatattcatttagcattaagtcaaggagactgagaatgactcaagggacgtcatagtaccatagttttaaggaccaaggtgtgcccagaattcaagtttcacaaatcccaatgctgtgcattgattatgttcaactttatgtgtgcattcttagaagagtaagaacaaataaagtacaccgtaatatacatataaatacattcatgtttgtgagagaaggaaagagtaagtaatttgaattggcagctttctttgctaaatctttaaattctgttaagatcctcaagtaactggggagtacatgctttaggacacaaacaaaaacaaagggcatgaaagtatctgaaagcaatgtagcacatatctatcgtaatatatgtaatatattgacataaaagacacaaactaatataaagttatagttatatcttaaaatataattgaagaagcatatgacatataacttatagaaatcagtatcaattcctcccatttcaattcagttaagacttctgtgatagatgtttatagcagagaagaaatgtctcatcaatagaaaactatcagataaagtttaggagataggaagaaggactgtgtgtagtaatgaaaataccaagttgcaacattacatgtttacaaaaaaaaatctgtgtttgtagtgtggaagttggtgactgttttaatcatcatctagacttgttaagtagaaaaattttaaaaatttgcttatgaaaatataacccccagaaagtaacaatgacaaagtattatatttatatatattattgtagagaatttgtatatttttaaagatgtcttaagatatcttaattttatttataagttttggtgtttacctgttttaaaatgataatgttggcatctgtgataaactatcaatgaggctcccatcatgccattttttgttcattttaatctttaaaaaataaaaattaggcatattaattatgcaaaaaaaa

SEQ ID NO: 58 - DNA, 5137 bp, Artificial Sequence
  LRRC2
cattccacaccctccgggatctccagtgtgaaaatgtctggccctgggtaggaggctgcagatagtccctgggccggggctcgcgctggccggctgcagcgcgcagggtgccaagccctcccctacgaagtctgttttgtctcaggctgggctgagtcacatagaatagatagatagttgatttagcacatgtcctccagatcatattatccgcctacaaatatagcctgttagcgcacaggcacgggaggcttcttccggctcggccgtgctgctcagcgggtgtaaacagcctctgcggtgtaaacagcctctgcggtgtaaacagccgcggcgggcaggccaggactgtcagtgcccgcccctcggggcaggtaatttcatgctcccaaaatgggacataaagtggttgtcttcgacatttctgtcatcagagccttgtgggaaactcgtgtcaagaagcacaaagcttggcagaagaaggaggtggaaaggcttgagaagagcgccttggagaagataaaggaggagtggaactttgtggccgaatgcaggaggaagggcatcccccaggctgtatactgcaagaatggcttcatagacaccagcgtgcggcttctggacaagattgaaaggaacactctcacaaggcagagttcacttcccaaggacagaggcaaacggagcagtgcgtttgtgtttgaactttctggggagcactggacggagctcccagattcattgaaggagcagacacacctgagagaatggtacataagcaataccttgattcaaatcattcctacatatattcagttatttcaagcgatgagaattctggatctgccaaaaaaccaaatctcacatcttccagcagaaatcggttgtttgaagaacctgaaagaactcaatgtgggtttcaactatctgaagagcattcctccagaattgggagattgtgaaaatctagagagactggattgttctggaaatctagaattaatggagctgccctttgaattaagtaatttgaagcaagttacatttgtagatatctcagcaaacaagttttccagtgtcccaatctgtgtcctgcggatgtcgaatttgcagtggttggatatcagcagcaataacctgaccgacctgccgcaagatatagacaggctagaggagctgcagagctttctcttgtataaaaacaagttgacctaccttccctattccatgctgaacctgaagaagctcactctgttagtcgtcagtggggaccatttggtggagctcccaactgccctttgtgactcatccacacctttaaaatttgtaagccttatggacaatcctattgataatgcccaatgtgaagatggcaatgaaataatggaaagtgaacgggatcgccaacattttgataaagaagttatgaaagcctatattgaagaccttaaagaaagagaatctgttcccagctataccaccaaagtgtcttttagccttcaactttgatatccatcagaagactgcaaatctcactattctctggagctatatataaatctttgttatgatcatgtcatataggaagaatggcttgtgcttaaggacaaagtctagaaaccactatcatagttgctaaaaaaaatggttttcaaatgtcaaatacatgagtatctccctccatggactggagaattgaaaaattggtttgtatattgatatttccaggttcatttgcatatacttttttccaaataatgcacatttaatatgttttaaaatgtcttatttttaagaattataactaaaagaccaaatactgaagttaagtgcattgttttcaggaatcaaaagataaaggggccgggtgtggtggctcacacctgtaatcccagcactttgggaggccgaagtgggtggatcacctgaggtccggagttcgaggctggtttggccagcatggcgaaaccccatctctactaaaaatacaaaaaattagctgggcatggtggcagttgcctgtaatcctagctactcaggaggctgaggcaggagaatcgcttgaacctgggaggtggagttgcagtgagccgagatcatgcgactgcactccagcctgggtgacagagccagactctgtctcaaaaaaaaaaaaaaagaaaagaaaaagataaagggattgtgaaaagagcatttatattggactaatcagatgagagtgttttgttattttgaaagagtttcttttactgagaataatcttccttgagtttatataaactgctatttccatatgttttaagttatattttggcaagtgtagactcccaggagagacttgtaggtacaatctaggccttgaagaaacaaaggctggaatatctgcccatgctttgggcatgagatgctcagatggtgcgtgggtagatctagttgaggaagtgtgggcctggctgttcatgggaagtcttcagtggccttcatggatggccatccagtcctgagtggtcaccctgggggtcctgggacacacctcagtaaagagcaaaggcaacgccctcagggtcccttcctccaagatggccatgtagggtaatggagatgaccagtccacactgataaggagttcctagcaaggcttccttgtgggtaccacaggacaactctgcccatagcaaagatgcttcagtccagagggagcccatgggctgtttgaatttgggagaggtgggattcattacaagactttgggctcttatgtcacatcacatgatttggagaaattagacacaatctcttatttttataccactgtcttgggctaaaataaacaggttgtggctgatggtgttgaagataaataagcttaaacaaataactttggccgggcacggtggctcacacctataatcccagcactatgggaggctgaggcaagcaggttgtttgagcccaggaatttgagaacaggattttgagaacagcttggacatcatgacgaaaccccatctccacaaaaaaattcaaaaaattagccaggtgtggtggcatgtgcctgtggtcccagctactcaggaggctgaggtgggaaaatcacttgagcccaggaggtcgaggctgcagtgtgctgtgattgtgacactgccctccagcctgggtgacagagtgagaccctgtctcaaaagcaaaacaaacagcaataacaatattattattgttataactaaaaaaaaaaaaacaaaaacaagcagcttttgtgactaagaaggaaaatatgcatatagtggcatatttttatatgaatcatctcctctgtggtcttgcccagtaccatccagtggagctttctgcagtgacggaaatgttctgtatttgcgttgtccaacgtggtaaaccagacacatgtgattcttgagcacttgaacaatgactgatgtgattgaagaacccatctttcaattcaattaaatttaaatagccacatttaactccagccttgggtttgacctgatggaaaattcccatgagagagtgctccaaaccgttccaaggtggggccagttgcgattctaaaggaagaagcactaaatggcagggtgatcagtccaaagcatttatgaggggagcttacatacagcatgggctgcagcgtccttgtgatgggcagtgagacaagggatgttctacctgggcatgtccccagcgagggggttgggggatggagttcacatgaagatgtaaggaatttgggtgggggctgggctggcttctacatgtttagcaacacggctgatctttcagtgtttccagcaacaacctaagcaccgttatcagtgcctaggaatgttcaaggcccaggctggggttcagacctgcagaggaaaacatcagctggctgggtcaaggcaccatgtgttacttggtcaggacagagacaaaaatgaggaaaactaggggaccccacacacatgtggctaccatactcctgaacaggtctagctagttatttgtttttttggaagttaatctggggtagaaatgtatggtgatttttattttctctgtctgaagaaccagccatttttaaaaaggttattattgacatcccaatattttgtcttggtgggcttactcataagtccaaacattttattctcaacaggtgtaaaacaggcagagcattctaaaaccacatggtagtgctttggtggaggactgcttccacttagaaacaaactctgagaagtaggctaagagaagacaagagggccgggcgcggtgactcacgcctataatcccagcactttgggaggccgagatgggtgaatcatgaggtcaggagttcgagaccagcctaaacaacatagtgaaaccctgtctctattaaaaatgcaaaaaattagccgggcgtggtgggcacccgtaatcccagctactcaggaggctgaggcaggagaattgcttgaacccaggaagcagaggttgcagtaagctgagatcccaccattgcactccagcctgggcaacagagtgagactccatctcaaaaaaaaaaaaaaaaaaaaaaaaagagagagagatgaaaagagtaggaaaatgagaaatcaccttcgttgaatcttaaatagttacatttttttctttttaacactaaaaatacaattcaaatttattagctctactacttgaatgattttggaattttatgtcatgctaaggtatgtgttacatatggccaagtggaaaatatatctgaagaggggctttcatacaaatagactgttcataatttatgtaaattttattttaataaaatcagttttttgtttaaaaaccttgtttcactgtcacatatgaaaaaaatactgcattgatatataattatttcatgttacataataacccaaaacaaataattacttgaatatgtttgtagagatactatttaatttattcatataaatgtgcagaaagattccaaaggagaatatatatcttgtgaaaatatggagatttgaaaatttgacatgatgcaaatagactgatacataatttggaaaggttatttacatggcagaatacatgtatgaatattaaagtaatatgaatgaaagaataaaatattcttagaagaaaa

SEQ ID NO: 59 - DNA, 6479 bp, Artificial Sequence
  APOOL
ttggccgaaagggttgtagacatggcggccatcaggatgggaaaactgacaaccatgcctgcaggtctgatatatgcatctgtaagtgtacatgcagccaaacaagaggaatccaaaaagcagctagtgaaaccagagcagctccccatatatactgcaccaccgctccagtctaaatatgttgaagagcagcctggtcatttacaaatgggctttgcttccatccgcactgcaactggttgttacattggctggtgcaagggtgtttatgtctttgtgaaaaatgggataatggatacagtacaatttggaaaagatgcttatgtctatctgaagaatcctcctcgagattttcttccgaaaatgggagttattacagtttcaggattggcgggcttggtttcagcgagaaaaggttccaagtttaagaaaattacttatcctctgggactggccactttaggagcaactgtttgctacccagttcagtccgtaataattgctaaggtaacagcaaaaaaggtatatgctacaagccagcaaatttttggagcagttaaatcattgtggacaaaaagcagcaaagaagagtcactccctaaacctaaagaaaaaactaagctaggatcctcttccgaaatagaagtacctgcaaaaacaactcacgtcttgaaacactcagtgcccttgccaacagaactcagctctgaagcaaagaccaaatcagaatccacttcaggtgcaacccagtttatgcctgaccccaagctcatggatcacgggcagtcccacccagaagatatagatatgtacagcactagaagctgaagtagactgcatgcagagactacacagaaaactacaagatgtgtggcgttgcaaataatgatgaaaataaatcatgtaatgggtaactgatacatagagtattacctaaaccaagtttctcccttacatttccaaatatgccatttgataaattacataagtggttaacacacaaactgtgaatgcagtgtaaacaatattaaatgattgatgaggagacttaggtagaagtattagcttgcatttgatgacctttaagggcacttaaaaaaaaatgaagacatgaattctagtgagattaaaatctaaaaatacatatatatatatgtatgtataaatacatacatatttatacatgtataaatacgtatttatacatatatgtataaatacatatacatatatgtataaatacatatacatatttatacatatatgtataaatacatacatatttatacatatatgtataaatacatacatatttatacatatatgtataaatacatacatatttatacatatatatgtataaatacatacatatttatacatataaacatatatttctgctctagctttcccagattaatgctagttaaattagaatggtgtatggaaaggtgtgtttccctctgtttttttttttttttttttttttttttttcccatttcctagagctggaataaaatatccatgttttatgggacttgagcttggctttgtcccttggttttgttaatgttaattcctcttaaatatctaaaaacatctctacctatttgagagggccatatgctacacaggcttcctaatactgcttagcaatccttctactggttcctaagtggtttactattgtgttccctggaagaggtattacaaacgttttattcttctcaagcctcttagaactgtcaaagttgactgtgcctcctatttcatagagaaaaaactaaattattagatatgaccattcccaaaacttcttcccatctaccttcaagacttacctcttttcagccatgcatcccccttttctaagacatgcttctctttgtgttcttgacctcattccttcccatctaagaccatattccaccctgtttaatttctagtcttcggtttctctttttacagtgagcaaattagaagaataggttagaagaatagggtagtagatactgtagtttctttcctccacctctacatagctgcaggtcttctctgtcttaaatcaacaataacaaaacaagacaaaaacctttccttaacttggcctcttcccttgaactattttttctctctccttcctataattgttatacttctttaaaaagtaattgttactttttgacaaaagtaaatattgtcccttttttccctactttcaagtcctctctgtcttgtgacattctggcctccatacctgcttaattttttttgagatggggtcttgctctgttgcccaggctggagtgcagtggcacaaacacagctcactgcaacctccacctcccaggatcaagcaatcctcccatctcaccctcccaagtagctgggactataggcacccgccaccatgcctaattttttgtatttttggtagtgacagggtttcaccatgttgtccaggctggtctcgaactcctgagctcaagcatctgtccgactcagcctaccacagtgttgggattacaggcgtgagccaccgcacccagcccctacttgaatttttatgtcattattgactcttcaccactctctccttgagactcacttatccctttgctctctatttttcctgcttttgttattcttcatttttcttctcttgctctgaatcccttaaatgctgaggctgctcaagtttcatccctagtcctattttctcattctatatgcacactcatttttcatttaacagacttcactggcttcaggcaccatttgttttattattcatattttcaacccccatatctctctagtgctgtagacctttatttctacttactagttatattcacctaacatcccatagatatgccaatgtcaatgtgcctaaaacaaaattgtctctacctcccgctccttcaaatctattctgtcttctctaatcctataattactctccctcaagtcatcatcatcacttttctgggttactgtaatagccttcaggctaatttgctcactgtcaatcttgctgtctctcatttcagaatatgttctgcttgcaggtgacagtaaactagttaaacaaatatttaatattagcttaagcaaaaaaaaaaaaaaaggcctatcctatttatagcctagaattaggcagtatagggttgggacagtggctcattggtgctatcaaggacgtagactttttctctttccactctgtcctctacagcatgctggtttgtcacctcatggtcacaagatgtctgctgtacctccagggagcagatacacattcaaagtaggaaatagcagataaaaatgtacacaagatgcgtctgactcccttttaccagaaaagtaaatgctttcttagaatctcctcagaagacctctgtgtatatctcaaccagtacttgtcatatagccacacacttagctcaaggaagatagggaatagggaaatcatgtttcttttcccctgtggtgaggaaggcaaggggtaaggggttgggaacaggtgctgaattaaagctaacatacagtatctactaccctattcttctaacccatttgtctattatgatatagttgtcttgacaactataatgaatagctgtctttctgaaatctttagtggctcatcattgcctgcagaatcaaaactccttagtctgatatacaaggcccttcatatctgattccagcttaccttctaatcctatcttccctctccttacccaccctactgctaatgtgtattatattgtctttatgacataccatttgtttcttgaacatgctttgctcattattgcctctttctctgcctgtgctagtgtgtcctcttagaatgttcttccatcttatcctgctctacattctaacttctacccatcctacaagtccaattccagtgtcatgttccctttctcaatcctccagggtagaatttagatgttctgtcttttagagataggtattgctatgttgcccaggctggtctcaaactcatggcctcaagcgatcctcccacctcagccaaccagacatgagtgactgtgctcagccttttttaaaaaaatgaaggtatttggtatggccgggtatggtggctcacacctataatcccagcactttgggaggccaaggtgggtgaatcacctgaggtcaggagtttgagaccagcctgaccaacatagtgaaaccctgtctctactaaaaacacgcaaaaagtgcaaaattagctaggcgtggtggctcatgcctgtaattccagctacttgggaggctgaggcaggagaatcacttgaatccgggaggtggaggctgcagtgagccgagatcgtgccattgcacttcagcctgggcacaagaacaaaactcagtctcaaaaaataaataataaaaaataaaggtatataatatgtcttagatttgatgaaatatgagtgtgtttgagatctgatccaaggttttaaaaaattcatttcaaatcctggagataaattctgaggagcttacttatgaaaaactagcaagtgatagctggtatttacagatatggtactttacacaatttatgtaattaatattttctcacagacaaggttccttgtggatatcactgaataatttttgtgtagtttctatgcccatgaagtgcctggtaggtagtaggaactcacacgttctgctatgctggttgcagcacaggacacaaaagttagaattatttcaaaggacttatactctactaggaaagagagaaacatagaaatatagtgttgtatgtggtatcttccctaagataagtacaaccaaagagctatggatgttcagagatagaatgtagtactgggatgatgtcaaggaggcagtggtacttaagctgctcaaggtagggaagcagtttacttgctagtttttcataagtaagctcttcagaatttatctccagtatttgaaatgaatttttttaaacctcagatctgaatatattcaaacacccatatttcatcaaatctaaggcatatcatatacctttaatttaaaaaaaaatgctgagcagagttgcttatgtctgggaggctgaagtgggaggattgcttgaggccaaaagtttgagaccagcctgagcaacatagcaagatcctgcctctaaaaacaaacaaacaaaaaatgctgccagttgatcattacatttatcccgacatcagatatgtcaaattgtgaaaagcaccttaattttgatgaaatatgataggtaaaaaatagcgcaaagctaagtataagtgacttttaaattatctgctcttttggattatcactactgctactagccgttagaatattggtttggataatggaaagttgactagagctacaaaatctgtttcaaaataaaagatctgctcaaacaagaatgtgatgatcacttgctgtattgtacaacaaagtcaaactgctgttagactcaggtgacagtcaaatgttggaggctgtgttgggatgagttgttacaaagcctctttcattcttcccatgccatgtccaggagttcttctctgttaaacctgaagagatgccagccctcctcagaggaaaggtctaaagcccctcgactagtatagtagttgatagaagcctggttccaaatgacgacaagaaagtgcatgcagttacattgagttgtgatggctatctgtttaaaaacaaacaagcaaatattactttcatttgaaagtataatcttcgttaacacatatattttattgaaggtctactctatgcaagacactatgtgtgaataatacttccaaatatagtagttaccttttgaacttttctatagctgtaaaaagaaaaaagtctcactgttctgagctttaaagccctctttaaaatctcaaaactgatttgcaaagcctttatcatacagaaaaggtgtacctaaaagaacacatgttctcatatgtttccaaaatacaagaagatcttgcttttatagtcttgtaatattcatactgtgagcctgtgtttttgaataaaaatgctttctaatctccctccttcttactttcccttgatagcaaaaagggtgtatagtgtggttgtggattatatataaatcaattttaattgactataattcatatactgtatatgatcatctgatttgaaaatccagtttaatttgggtagaaatttgaagtatatgttggggttatgttcaaatggtgagattaatgatttaatttatgccctgtgaatatttattaagaaaaggttaatgtatagaatatcaatactaattgtaatacatacctgacttagcctcttcagcatttcagctccaatacctaggccttttaaatagacaatgcaaagtgaaaactgcaaatttcacttaacttgttatttgctttagtttaaaataaataatatctaaaactctgtaaaaaaaaaaaaa

SEQ ID NO: 60 - DNA, 9685 bp, Artificial Sequence
  HCN1
ccgtcgccggccgcgtcctccgggcatggaaggaggcggcaagcccaactcttcgtctaacagccgggacgatggcaacagcgtcttccccgccaaggcgtccgcgacgggcgcggggccggccgcggccgagaagcgcctgggcaccccgccggggggcggcggggccggcgcgaaggagcacggcaactccgtgtgcttcaaggtggacggcggtggcggcggtggcggcggcggcggcggcggcgaggagccggcggggggcttcgaagacgccgaggggccccggcggcagtacggcttcatgcagaggcagttcacctccatgctgcagcccggggtcaacaaattctccctccgcatgtttgggagccagaaggcggtggaaaaggagcaggaaagggttaaaactgcaggcttctggattatccacccttacagtgatttcaggttttactgggatttaataatgcttataatgatggttggaaatctagtcatcataccagttggaatcacattctttacagagcaaacaacaacaccatggattattttcaatgtggcatcagatacagttttcctattggacctgatcatgaattttaggactgggactgtcaatgaagacagttctgaaatcatcctggaccccaaagtgatcaagatgaattatttaaaaagctggtttgtggttgacttcatctcatccatcccagtggattatatctttcttattgtagaaaaaggaatggattctgaagtttacaagacagccagggcacttcgcattgtgaggtttacaaaaattctcagtctcttgcgtttattacgactttcaaggttaattagatacatacatcaatgggaagagatattccacatgacatatgatctcgccagtgcagtggtgagaatttttaatctcatcggcatgatgctgctcctgtgccactgggatggttgtcttcagttcttagtaccactactgcaggacttcccaccagattgctgggtgtctttaaatgaaatggttaatgattcttggggaaagcagtattcatacgcactcttcaaagctatgagtcacatgctgtgcattgggtatggagcccaagccccagtcagcatgtctgacctctggattaccatgctgagcatgatcgtcggggccacctgctatgccatgtttgtcggccatgccaccgctttaatccagtctctggattcttcgaggcggcagtatcaagagaagtataagcaagtggaacaatacatgtcattccataagttaccagctgatatgcgtcagaagatacatgattactatgaacacagataccaaggcaaaatctttgatgaggaaaatattctcaatgaactcaatgatcctctgagagaggagatagtcaacttcaactgtcggaaactggtggctacaatgcctttatttgctaatgcggatcctaattttgtgactgccatgctgagcaagttgagatttgaggtgtttcaacctggagattatatcatacgagaaggagccgtgggtaaaaaaatgtatttcattcaacacggtgttgctggtgtcattacaaaatccagtaaagaaatgaagctgacagatggctcttactttggagagatttgcctgctgaccaaaggacgtcgtactgccagtgttcgagctgatacatattgtcgtctttactcactttccgtggacaatttcaacgaggtcctggaggaatatccaatgatgaggagagcctttgagacagttgccattgaccgactagatcgaataggaaagaaaaattcaattcttctgcaaaagttccagaaggatctgaacactggtgttttcaacaatcaggagaacgaaatcctcaagcagattgtgaaacatgacagggagatggtgcaggcaatcgctcccatcaattatcctcaaatgacaaccctgaattccacatcgtctactacgaccccgacctcccgcatgaggacacaatctccaccggtgtacacagcgaccagcctgtctcacagcaacctgcactcccccagtcccagcacacagaccccccagccatcagccatcctgtcaccctgctcctacaccaccgcggtctgcagccctcctgtacagagccctctggccgctcgaactttccactatgcctcccccaccgcctcccagctgtcactcatgcaacagcagccgcagcagcaggtacagcagtcccagccgccgcagactcagccacagcagccgtccccgcagccacagacacctggcagctccacgccgaaaaatgaagtgcacaagagcacgcaggcgcttcacaacaccaacctgacccgggaagtcaggccactctccgcctcgcagccctcgctgccccatgaggtgtccactctgatttccagacctcatcccactgtgggcgagtccctggcctccatccctcaacccgtgacggcggtccccggaacgggccttcaggcagggggcaggagcactgtcccgcagcgcgtcaccctcttccgacagatgtcgtcgggagccatccccccgaaccgaggagtccctccagcaccccctccaccagcagctgctcttccaagagaatcttcctcagtcttaaacacagacccagacgcagaaaagccacgatttgcttcaaatttatgatccctgctgattgtcaaagcagaaagaaatactctcataaactgagactatactcagatcttattttattctatctcctgatagatccctctagcctactatgaagagatattttagacagctgtggcctacacgtgaaatgtaaaaatatatatacatatactataaaatatatatctaaattcccaagagagggtcaaaagacctgtttagcattcagtgttatatgtcttcctttctttaaatcattaaaggatttaaaatgtcgttgtaagattatttatttctaacctacttttacttaagtcctttgatatgtatatttctctattttatgaagagttcttggattcaatggaaacaaaactgattttaaaaaggcaactcaaatgaactagtaaatagcaccaatcaaaactttctttcattagctgtgtctctgcatctaaattgttaatcattaatggtggagaattaaataacaaatcccattttatagatctaaattgtatttcggtgctttcaatttcaaattaggttaaagaatgcactacttgcttggccaccgtaggagactagcattgccactgtttgttaagaatatcactaacctcaaacatgttcattgatctttcagaaagctgagggaaaattaatatttgtcttcatgtgttatcggacttttaccaagactcgatcaatgttagttgtaaataactttttcaacccaaataaaaatagctattctgtgttgtatgaaggtaaaagtcattgtttaagaatttagttttattgcttcacttcaaaacttagagttttaaattttacaaaacctgattgtgagaattattcaattgtaatgcaatggcttgaaacctacaatattattttaacctgcaatgttttatgcaaaattgtatgctcgaatctacaaattgcttgtattacaccaaaaatcgttacttttctttcttcttgccataatcaagcatctgaaaatagtccctgcatgcttctggggaaaaaaaaataggttcaaatcagtcattgtagagaaaggcttacagtatttctcgtttctagaaaagcataacaattcattaattgcctatcttataattcctataaggctgacttggatctctgacttaagtctagaagtgaggttttcacttttatttaatattattgctattattatttaaataattatttgtaaaccacagcttgatttggagttaagtgttgtctgtgtcttcactgtagctggtaatttactatggtattaatttaaagaaataaattcaatacagcatcacgtctgtttgggaacacacattttgctctatgtatattgtaactaaatggttagtaaactttaaggcatgtggtgactaacgtagcccttagataggaggtttgtcatttttaatgtgttgaaaatagtacagacatggtgacagaaagcaggggtaaagttgaacgtctatgagcattgtctgtctgttttcttaactctttacatgatctgtgagcacctgcttcttctcaaagaactcccttagtaatcatttgtgcctaatgcatcccacacatgtggagtatgactggaacacaattgaaagattcctaacaactggctgcggtaaataacccaagttaagagcatgacttaaagtggaggtcttcagtatctctggcactggcaatacatttaagaacatacagagatcacacattatgtgggacagggcctgcagatagacttgaggacagaaaacaaaaacaaaagcagaaactctaaagtggatccttgctgcctgttatgccttttgtggatataatacctataataccaaaatgagttgttatgtttaatttcaaacaaatcccaactggtgtggaagtaattaactgctagtcgatgtaatgtaatcatcaatatgctggtgacatatgatggcatgtcaggaatactgttgtaagaaagggattgttcagtctacctagaacctatgggaaagctgcaagaccatttacatatcagtacaaaactcctttattttattaaaatatgagaattaacttcaatttattaagattacgtattggtcctttaaattattaaaggtttacatttgataggattaatggatttggtagtgaaatatttttatatatataaatttttggttttttattttgagcactattgggaaacataagcaaaattgaaatgcatggtctttcagtgcaaccatacaatttttattcactttgtaatagaatggacaaaaaaactaaggtttatatattaaactaataaaaaggtacagggtaaattatatacatatatgtatgaatgtatatatacttagattaagaaaaaaaaatgactcacattcctgtaatataaaggtccattgctagttgaaaagtgacctcttttctctgtacatagtgaagcccgtatgtatggagttttaatctgtacagaaagaaatgtattattcattggtctttctgctgctggaaagataatagaatagctgattcttacaacaactgtatgatcagggatgagttagagtatttcttttgtctttgctcaaagccatacatatataaatatatataaagattattaataaattcaacaaaaaataaactacaatcatgaatattttattttatcaatatatgctaatcaaatgttttattttattaatgagtacagctttgcctctatttttacatcataaaatttccaagagcttatacttgataatcacataaaatcaattatattctataattctggaatgagaggactttaaatagaacatggatttttcaaccacttctttgtttacctttttcgtatagtaaaatatgagcttattttcttttttgctctgtgcctttttagaatgtggttgttctccaacttcaaaacacaaccattttgtgtaattattggatatacagatgagaaataattttcctgtaataatggtaaataattgtcctgtaatatatttatacaaacctattttgttataatagttctatgacatacctattttgttataatagttttataacatacctattttgttataatagggccttgggctctattataacaaaacaggtttatataaatacattcatatttatagccttaaacaaaataggtttgtatagtaggcccaaggccctattataacaaaataggtttgtataaatatattcatatttatagccttgggccctgcaaagttatttggagagtgatagaacctccccacacaagtgggttttaaatgatacctaaaagcctgagatagagtttatcataatgagaataagtagtgaagcattcctgaaaacaaggaggataaatagtagcaatggcaatatattctattcaccaaaaaagtagcttgtctccaggtctggatgacctcttcataagtgaacaattccctgatgaatgctgttccactttaaagagatggttattttgcaatttataaacttaactgagcatactattttcaggacactacaaagtacatagtcaagttattaccgtcattcctataggacagagaatgatttaaacaatatgacatgtttaaaattttagatgatttatttcaaatcctgaattatgtctacttcaaattatgagcaatctctattatctttcaggactatttaaaaaatctccatacctcctctttcagcttaggtttttatatttgttaattttactatgttactttgcttctatggccctcacttgcactgtttataatgttaacctgtttgaatgagatatctctccattatatctttatctttttagaacatgtgccataaaacccatgtggttattttgttcatatgcactacaactagcaaacttttattttatgttcacctactttaaaaagtactcatactgtaccatgggaaagaaacatgggccttatagaatggaatgctgagctattttgagtcctgaaaacaatggccaaaaatttaaggaactgtggttgctgcatgcaccaaattgtagcacatacaaataaataaaatacagttctataactgtattcaatatggttattttcaaggaaaaataggatagaaattttctttgaaagatttgctattgtacttagggaagtacacctgctattacccctcaaaagcaatgactttcttaagcaatttcaatttttttcctttttaacaaccctgcacttgcacaaccctgcatctcttgtctcaccctaatgctgaccctgcttccaattcaggctttgacagggacaaatggagattttaaggttttttaatgagagaagccttgctgacactccccgcatcccaccttgaaaattatttaaagatgatcttaaaagaacctacagataatgctctgaatttgtttacaaggtccttgatgtggagagaatgagtaatacattaaatgctggggaaataattatcatttagtgaaaaattaagcatgcttttctaaaatgtggatgtttaacagagcacagctgattgggaacactggcagttcaatgcagctggagtgtctcacagggtgaagaggaacccagatcaagtgggaaatagggatttcaaaaaccttctgaaaggcttttaacatcagggcaaaggttttacagtgttgtactttatattcttaatttaagcttatcaacggggaggattcacattgaaatgtctgttttgctaatgtaacaaggaataaaataatttatgacacagcaaaaactgggggctatttacaaccccaccctgccttgtgaggatgctgggtcctaaggaaggtcctaggtttgctaaatagagtaatgggaataggaaactgaaagtttacttgctttgcgtaagataatatattgcggcagggaaggggtacaagaagataagagctagaacctgtgagaagggaaagaagtgataaaataattttggctaaaataaagcaagttctcaggccaggcgtggtggctcatgcctgtaatcctagcactttgggaggccaaagtgggaggaatgcttgaggccaggaattggagaccaaccagggcagcatgtcaagacctggtctctacaaggaaaaaaaatttttttaattgaccagtatatacttacatacctgcagtgtttagaaaacccgactataggtggtgtattcctgtagtcctagttactcagaaagttaaggcaggaggatcgcttgaacttaggaggtcaaggctgcagtgagccctgttcgttccactgcactccagcttgggggacagagcaaaaccctttctcaagaaaaacccaaacaaacaaaaaagtgaagccagttctttaatttctattggagatatcacacacgctccaaagagtggcaaaggtgaacattctttggagctattatatttctaatgtaacatcaatggccatttactcccaaagggaaacatctttttttttttttttttttaagatggagtctggctctgtcacccaggtgggagtgcaatggcaggatcttggcccactgcaacatcagcctcccaggtttaagcaattctcctgcatcagcctccagagtagctgggattacaggtgcccgccaccatggctagctaaatttttgtaatttttagtagagacagggttttaccatgttggccaggccggtctcgaacccctaacctcaagtgatccgcccgcctcaccctccagaagtgctaggattacaggcctgagccaccgcacccggccctgctatttttttctatgtagttgtttcagtaataccatatgagcagagaatactattgattcattcaattgaagaaatctgaataaattagtaaatataataattcttcaaaagaggaccactttatgtttccaatagattatataattgaattcaggtaacgtagagttattcagacttttttttttaaataacggaattttgcaaaaaaacaggttgcatcgttttctacagagaatattcagatgtgtagaggcaaagagactttcttgaaaggtttttatttcctgttaaatttgtgaggaaaactcctgagaaaggaaagatttacttttgaaggaagaaagaacataacccaaagaaatttgaaagattcaaaaagagttttccaaatgtattctcatttctttctcatatttgttcaaggtcttagtttccaagcattcaaaattaaatcttgtttgcctaactcttctaacatctattaccaacctaacatattacaattctgtttaaaatgtgcagttctaaatgttcttgcgtgcctcactgtggaaagtgtggtgcatggaactgcagcgtcagtatcacccagaagtataattacaagaagtgcagagtccttggccttaccctgtacctacagaagtccgcttttgggcaagatccccagatgattcatatgtgtattaatattgaaaaaattggaactagtaagtcctagaggaggtaaattttaagggctttttaagggaacttccaagtgtgaagacatttctggagatgacaagtcaacatagcatgggatcttggctagacaaggaaagcgagagaacattaaataaacacaagcaacgacaaaccacctatgttataattttatcctggaccatccaaagtttactcttggtcacgctgtctaacccagcctgcctcctggcacttgctagttagaaccagggaagagaaaactaatatgtgttaggtattataatttccttatgtcacataaattttggtgccatagctagcaatgtttcttaatatcacatcagtacaatgtgtccattgccttctgtaacatttttaatgctatcaataatacattgacattataaaaataaatgaatgtggtcaaaaaaaaaaaaaaaaaa

SEQ ID NO: 61 - DNA, 1841 bp, Artificial Sequence
  TCIM
agaatgatttcactacagactctctggaaagcctgggagctgaattccggaagatccccacatcgatgaaagcaaagcgaagccaccaagccatcatcatgtccacgtcgctacgagtcagcccatccatccatggctaccacttcgacacagcctctcgtaagaaagccgtgggcaacatctttgaaaacacagaccaagaatcactagaaaggctcttcagaaactctggagacaagaaagcagaggagagagccaagatcatttttgccatagatcaagatgtggaggagaaaacgcgtgccctgatggccttgaagaagaggacaaaagacaagcttttccagtttctgaaactgcggaaatattccatcaaagttcactgaagagaagaggatggataaggacgttatccaagaatggacattcaaagaccaagtgagtttgtgagattctaacagatgcagcattttgctgctaccttacaagcttctcttctgtcaggactccagaggctggaaagggaccgggactggaaagggaccaggactgaacagactggttacaaagactccaaacaatttcatgccctgtgctgttacagaggagaacaaaatgctttcagcaaggatttgaaaactcttccgtccctgcaggaaaggattgatgctgatagaagagcctggacagatgtaatgagaactaaagaaaacagatggctggagatgacatttatccagggtcactttgtcaggccctaggacttaaatcgaagttgaacttttttttttttttttaaccaaatagataggggaagggaggagggagagggaggacagggagagaaaataccatgcataaattgtttactgaatttttatatctgagtgttcaaaatatttccaagcctgagtattgtctattggtatagatttttagaaatcaataattgattatttatttgcacttattacaatgcctgaaaaagtgcaccacatggatgttaagtagaaattcaagaaagtaagatgtcttcagcaactcagtaaaaccttacgccaccttttggtttgtaaaaggttttttatacatttcaaacaggttgcacaaaagttaaaataatggggtcttttataaatccaaagtactgtgaaaacattttacatattttttaaatcttctgactaatgctaaaacgtaatctaattaaatttcatacagttactgcagtaagcattaggaagtgaatatgatatacaaaatagtttataaagactctatagtttctataatttattttactggcaaatgtcatgcaacaataataaattattgtaaactttgtggcttttggtctgtgatgcttggtctcaaaggaaaaaataagatggtaaatgttgatatttacaaacttttctaaagatgtgtctctaacaataaaagttaattttagagtagttttatattaattaccaaactttttcaaaacaaattcttacgtcaaatatctgggaagtttctctgtcccaatcttaaaatataaaatatagatatagaagttcatagattgactccttggcatttctatttatgtatccattaaggatgagttttaaaaggctttctcttcatacttttgaaaaatttcttctatgattacagtagctatgtacatgtgtacatctatttttcccaagcaatatgttttgggtttagagtctgagtgatgaccaagattctgtgtgttactactgtttgtttaataggaacaaatatagaaataatattatctctttgcttatttcccgttaaaactataataaaatgtttctaggacagca

SEQ ID NO: 62 - DNA, 573 bp, Artificial Sequence
  FDCSP
ctccattccattatacctttgagtatataaaacagctacaatattccagggccagtcacttgccatttctcataacagcgtcagagagaaagaactgactgaaacgtttgagatgaagaaagttctcctcctgatcacagccatcttggcagtggctgttggtttcccagtctctcaagaccaggaacgagaaaaaagaagtatcagtgacagcgatgaattagcttcagggttttttgtgttcccttacccatatccatttcgcccacttccaccaattccatttccaagatttccatggtttagacgtaattttcctattccaatacctgaatctgcccctacaactccccttcctagcgaaaagtaaacaagaaggaaaagtcacgataaacctggtcacctgaaattgaaattgagccacttccttgaagaatcaaaattcctgttaataaaagaaaaacaaatgtaattgaaatagcacacagcattctctagtcaatatctttagtgatcttctttaataaacttgaaagcaaagattttggtttcttaatttccacaaaaaaaaaa

SEQ ID NO: 63 - DNA, 1129 bp, Artificial Sequence
  MTUS2-AS1
gtggcagccctcggaatcacggggaggtcactgccacaacctggctctttgtaggggggtccaactccaggcaggggatcactgcctgaggtacctctttagagtcctgagtgtggctcctggaccatccccttcccactgcttgtccacgcgcttgcaccgctatgagcgatgacggcaaaggaaaagaaaagcgtcctccctacgaggtggtctgtttcccagtggcagggggagctacggtacacaagcacaggttcacatttatgaagcagccaataagaattcccagcctgagaggaccttggaaccagaaggaattggaggagatttaaacaagctgacccaaggaaagcacaagatctttctatgcattgaagatcaccaaatcaaagataaaagtgctcgaccattatggcctatggcaaactcgggctggctgaagcatccttctcttccatttagaaccctggtgaggccccttagaccaccactgggctgtcctcctccctcctcagagacagagttctgggctgggccatggaggtgtctgtcaacacggcagtagtcctcgttctatggaaaaccagctgttccctgtgacacgactccattcccgcagctgcctgctattcagctgggctgacggacagcagagcacagggttggaagaccaccctctcagacaggtttaccaagaagctcactgagaggcgacacaaacggccaagaacatgaaaagacggtcagtgcccttgcagatggaagcaggcaatcatttttcacctgcaaggctgataaagatgaaatgttctgataatacaggaagagtataaggaaactgtcactcgatggactccaggtgaaatataactaatccagctgccttggagggaaaagatatctttcaaaattgaaatgacaggaatggcagcattatgggtgggagataaagaatctgggtttctttcaggggtgatgaaaatgttctaaaacggattgtggtgacagttttccacaactcggaatatactgaaaaccaccacattgtatacttaaatgggtgggttgtatggtatgtgaattatatctcaataaaatttttaccaaaagaaaaaaaaaaaaaaaa

SEQ ID NO: 64 - DNA, 19296 bp, Artificial Sequence
  XIST
ccttcagttcttaaagcgctgcaattcgctgctgcagccatatttcttactctctcggggctggaagcttcctgactgaagatctctctgcacttggggttctttctagaacattttctagtcccccaacaccctttatggcgtatttctttaaaaaaatcacctaaattccataaaatatttttttaaattctatactttctcctagtgtcttcttgacacgtcctccatatttttttaaagaaagtatttggaatattttgaggcaatttttaatatttaaggaatttttctttggaatcatttttggttgacatctctgttttttgtggatcagttttttactcttccactctcttttctatattttgcccatcggggctgcggatacctggttttattattttttctttgcccaacggggccgtggatacctgccttttaattcttttttattcgcccatcggggccgcggatacctgctttttatttttttttccttagcccatcggggtatcggatacctgctgattcccttcccctctgaacccccaacactctggcccatcggggtgacggatatctgctttttaaaaattttctttttttggcccatcggggcttcggatacctgctttttttttttttatttttccttgcccatcggggcctcggatacctgctttaatttttgtttttctggcccatcggggccgcggatacctgctttgatttttttttttcatcgcccatcggtgctttttatggatgaaaaaatgttggttttgtgggttgttgcactctctggaatatctacacttttttttgctgctgatcatttggtggtgtgtgagtgtacctaccgctttggcagagaatgactctgcagttaagctaagggcgtgttcagattgtggaggaaaagtggccgccattttagacttgccgcataactcggcttagggctagtcgtttgtgctaagttaaactagggaggcaagatggatgatagcaggtcaggcagaggaagtcatgtgcattgcatgagctaaacctatctgaatgaattgatttggggcttgttaggagctttgcgtgattgttgtatcgggaggcagtaagaatcatcttttatcagtacaagggactagttaaaaatggaaggttaggaaagactaaggtgcagggcttaaaatggcgattttgacattgcggcattgctcagcatggcgggctgtgctttgttaggttgtccaaaatggcggatccagttctgtcgcagtgttcaagtggcgggaaggccacatcatgatgggcgaggctttgttaagtggttagcatggtggtggacatgtgcggtcacacaggaaaagatggcggctgaaggtcttgccgcagtgtaaaacatggcgggcctctttgtctttgctgtgtgcttttcgtgttgggttttgccgcagggacaatatggcaggcgttgtcatatgtatatcatggcttttgtcacgtggacatcatggcgggcttgccgcattgttaaagatggcgggttttgccgcctagtgccacgcagagcgggagaaaaggtgggatggacagtgctggattgctgcataacccaaccaattagaaatgggggtggaattgatcacagccaattagagcagaagatggaattagactgatgacacactgtccagctactcagcgaagacctgggtgaattagcatggcacttcgcagctgtctttagccagtcaggagaaagaagtggaggggccacgtgtatgtctcccagtgggcggtacaccaggtgttttcaaggtcttttcaaggacatttagcctttccacctctgtcccctcttatttgtcccctcctgtccagtgctgcctcttgcagtgctggatatctggctgtgtggtctgaacctccctccattcctctgtattggtgcctcacctaaggctaagtatacctccccccccaccccccaacccccccaactccccacccccaccccccaccccccacctccccacccccctacccccctacccccctacccccctctggtctgccctgcactgcactgttgccatgggcagtgctccaggcctgcttggtgtggacatggtggtgagccgtggcaaggaccagaatggatcacagatgatcgttggccaacaggtggcagaagaggaattcctgccttcctcaagaggaacacctaccccttggctaatgctggggtcggattttgatttatatttatcttttggatgtcagtcatacagtctgattttgtggtttgctagtgtttgaatttaagtcttaagtgactattatagaaatgtattaagaggctttatttgtagaattcactttaattacatttaatgagtttttgttttgagttccttaaaattccttaaagtttttagcttctcattacaaattccttaacctttttttggcagtagatagtcaaagtcaaatcatttctaatgttttaaaaatgtgctggtcattttctttgaaattgacttaactattttcctttgaagagtctgtagcacagaaacagtaaaaaatttaacttcatgacctaatgtaaaaaagagtgtttgaaggtttacacaggtccaggccttgctttgttcccatccttgatgctgcactaattgactaatcacctacttatcagacaggaaacttgaattgctgtggtctggtgtcctctattcagacttattatattggagtatttcaatttttcgttgtatcctgcctgcctagcatccagttcctccccagccctgctcccagcaaacccctagtctagccccagccctactcccaccccgccccagccctgccccagccccagtcccctaaccccccagccctagccccagtcccagtcctagttcctcagtcccgcccagcttctctcgaaagtcactctaattttcattgattcagtgctcaaaataagttgtccattgcttatcctattatactgggatattccgtttacccttggcattgctgatcttcagtactgactccttgaccattttcagttaatgcatacaatcccatttgtctgtgatctcaggacaaagaatttccttactcggtacgttgaagttagggaatgtcaattgagagctttctatcagagcattattgcccacaatttgagttacttatcattttctcgatcccctgcccttaaaggagaaaccatttctctgtcattgcttctgtagtcacagtcccaattttgagtagtgatcttttcttgtgtactgtgttggccacctaaaactctttgcattgagtaaaattctaattgccaataatcctacccattggattagacagcactctgaaccccatttgcattcagcagggggtcgcagacaacccgtcttttgttggacagttaaaatgctcagtcccaattgtcatagctttgcctattaaacaaaggcaccctactgcgctttttgctgtgcttctggagaatcctgctgttcttggacaattaaagaacaaagtagtaattgctaattgtctcacccattaatcatgaagactaccagtcgcccttgcatttgccttgaggcagcgctgactacctgagatttaagagtttcttaaattattgagtaaaatcccaattatccatagttctgttagttacactatggcctttgcaaacatctttgcataacagcagtgggactgactcattcttagagccccttcccttggaatattaatggatacaatagtaattattcatggttctgcgtaacagagaagacccacttatgtgtatgcctttatcattgctcctagatagtgtgaactacctaccaccttgcattaatatgtaaaacactaattgcccatagtcccactcattagtctaggatgtcctctttgccattgctgctgagttctgactacccaagtttccttctcttaaacagttgatatgcataattgcatatattcatggttctgtgcaataaaaatggattctcaccccatcccaccttctgtgggatgttgctaacgagtgcagattattcaataacagctcttgaacagttaatttgcacagttgcaattgtccagagtcctgtccattagaaagggactctgtatcctatttgcacgctacaatgtgggctgatcacccaaggactcttcttgtgcattgatgttcataattgtatttgtccacgatcttgtgcactaacccttccactccctttgtattccagcaggggacccttactactcaagacctctgtactaggacagtttatgtgcacaatcctaattgattagaactgagtcttttatatcaaggtccctgcatcatctttgctttacatcaagagggtgctggttacctaatgcccctcctccagaaattattgatgtgcaaaatgcaatttccctatctgctgttagtctggggtctcatcccctcatattccttttgtcttacagcagggggtacttgggactgttaatgcgcataattgcaattatggtcttttccattaaattaagatcccaactgctcacaccctcttagcattacagtagagggtgctaatcacaaggacatttcttttgtactgttaatgtgctacttgcatttgtccctcttcctgtgcactaaagaccccactcacttccctagtgttcagcagtggatgacctctagtcaagacctttgcactaggatagttaatgtgaaccatggcaactgatcacaacaatgtctttcagatcagatccattttatcctccttgttttacagcaagggatattaattacctatgttacctttccctgggactatgaatgtgcaaaattccaatgttcatggtctctccctttaaacctatattctaccccttttacattatagaaagggatgctggaaacccagagtccttctcttgggactcttaatgtgtatttctaattatccatgactcttaatgtgcatattttcaattgcctaattgatttcaattgtctaagacatttcaaatgtctaattgattagaactgagtcttttatatcaagctaatatctagcttttatatcaagctaatatcttgacttctcagcatcatagaagggggtactgatttcctaaagtctttcttgaatttctattatgcaaaattgccctgaggccgggtgtggtggctcacacctgtaatcccagcactttgggaggctgaggtgggaagatcccttactgccaggagtttgagaccagcctggccaacattaaaaaaaaaaaaaagtaagacaattgccctggaatcccatccccctcacacctccttggcaaagcagcaggagtgctaactagctagtgcttcttctcttatactgcttaaatgcgcataattagcagtagttgatgtgcccctatgttagagtagaatcccgcttccttgctccatttgcattactgcaggagcttctaactagcctgaattcactctcttggactgttaatgtgcatacttatatttgctgctgtacttttttaccatgtaaggaccccacccactgtatttacatcccagctggaagtacctactacttaagacccttagactagtaaagttagcgtgcataatcttaggtgttatatacacattttcagttgcatacagttgtgccttttatcaggactcctgtacttatcaaagcagagagtgctaatcaatattaagcccttctcttcgaactgtagatggcatgtaattgcagttgtcaatggtccttcaattagacttgggtttctgacctatcacaccctctttgctttattgcatggggtactattcacttaaggcccctttctcaaactgttaatgtgcctaatgacaattacatcagtatccttccttttgaaggacagcatggttggtgacacctaaggccccatttcttggcctcccaatatgtgtgattgtatttgtcgaggttgctatgcactagagaaggaaagtgctcccctcatccccacttttcccttccagcaggaagtgcccaccccataagacccttttatttggagagtctaggtgcacaattgtaagtgaccacaagcatgcatcttggacatttatgtgcgtaatcgcacactgctcattccatgtgaataaggtcctactctccgaccccttttgcaatacagaagggttgctgataacgcagtccccttttcttggcatgttgtgtgtgattataatcgtctgggatcctatgcactagaaaaggagggtcctctccacatacctcagtctcacctttcccttccagcagggagtgcccactccataagactctcacatttggacagtcaaggtgcgtaattgttaagtgaacacaaccatgcaccttagacatggatttgcataactacacacagctcaacctatctgaataaaatcctactctcagaccccttttgcagtacagcaggggtgctgatcaccaaggccctttttcctggcctggtatgcgtgtgattatgtttgtcccggttcctgtgtattagacatggaagcctcccctgccacactccacccccaatcttcctttcccttccggcagggagtgccctctccataagacgcttacgtttggacaatcaaggtgcacagttgtaagtgaccacaggcatacaccttggacattaatgtgcataaccactttgcccattccatctgaataaggtcctactctcagaccccttttgcagtacagcaggggtgctgatcaccaaggccccttttcttggcctgttatgtgcgtgattatatttgtctgggttcctgtgtattagacaaggaagccttccccccgcccccacccccactcccagtcttcctttcccttccagcagggagtgccccctccataagatcattacatttggacaatcaaggtgcacaattataagtgaccacagccatgcaccttggacattattggacattaatgtgcgtaactgcacatggcccatcccatctgaataaggtcctactctcagatgccctttgcagtacagcaggggtactgaatcaccaaggccctttttcttggcctgttatgtgtgtgattatatttatcccagtttctgtgtaatagacatgaaagcctcccctgccacaccccacctccaatcttcctttcccttccaccagggagtgtccactccatatacccttacatttggacaatcaaggtgcacaattgtaagtgagcataggcactcaccttggacatgaatgtgcataactgcacatggcccatcccatctgaataaggtcctactctcagaccctttttgcagtacagcaggggtgctgatcaccaaggccccttttcctggcctgttatgtgtgtgattatatttgttccagttcctgtgtaatagacatggaagcctcccctgccacactccacccccaatcttcctttcccttctggcaggaagtacccgctccataagacccttacatttggacagtcaaggtgcacaattgtatgtgaccacaaccatgcaccttggacataaatgtgtgtaactgcacatggcccatcccatctgaataaggtcctactctcagaccccttttgcagtacagtaggtgtgctgataaccaaggcccctcttcctggcctgttaacgtatgtgattatatttgtctgggttccagtgtataagacatggaagcctcccctgccccaccccaccctcaatcttcctttcccttctggcagggagtgccagctccataagaaccttacatttggacagtcaaggtgcacaattctaagtgaccgcagccatgcaccttggtcaataatgtgtgtaactgcacacggcctatctcatctgaataaggccttactctcagaccccttttgcagtacagcaggggtgctgataaccaaggcccattttcctggcctgttatgtgtgtgattatatttgtccaggtttctgtgtactagacaaggaagcctcctctgccccatcccatctacgcataatctttcttttcctcccagcagggagtgctcactccataagacccttacatttggacaatcaaggtgcacaattgtaagtgaccacaaccatgcatcttggaaatttatgtgcataactgcacatggcttatcctatttgaataaagtcctactctcagaccccctttgcagtatagctggggtgctgatcactgaggcctctttgcttggcttgtctatattcttgtgtactagataagggcaccttctcatggactccctttgcttttcaacaaggagtacccactactttttaagattcttatatttgtccaaagtacatggttttaattgaccacaacaatgtcccttggacattaatgtatgtaatcaccacatggttcatcctaattaaacaaagttctaccttctcaccctccatttgcagtataccagggttgctgaccccctaagtccccttttcttggcttgttgacatgcataattgcatttatgttggttcttgtgccctagacaaggatgccccacctcttttcaatagtgggtgcccactccttatgatctttacatttgaacagttaatgtgaataattgcagttgtccacaaccctatcacttctaggaccattatacctcttttgcattactgtggggtatactgtttccctccaaggccccttctggtggactatcaacatataattgaaattttcttttgtctttgtcagtagattaaggtcataccccatcacctttcctttgtagtacaacagggtgtcctgatcaaccaaagtcctgttgttttggactgttaatatgtgcaattacatttgctcctgatctgtgcactagataaggatcctacctactttcttagtgtttttagcaggtagtgcccactactcaagactgtcacttggaatgttcatgtgcacaaactcaattctctaagcatgttcctgtaccacctttgctttagagcagggggatgatattcactaagtgccccttcttttggacttaatatgcattaatgcaattgtccacctcttcttttagactaagagttgatctccacatattccccttgcatcaggggcatgttaattatgaatgaacccttttcttttaatattaatgtcataattgtatttgtggacctgtgtaggagaaaaagaccctatgttcctcccattaccctttggattgctgctgagaagtgttaactactcataatctcagctcttggacaattaatagcattaataacaattatcaagggcactgatcattagataagactcctgcttcctcgttgcttacatcgggggtactgacccactaaggccccttgtactgttaatgtgaatatttgcaattatatatgtctccttctggtagagtgggatattatgccctagtatcccctttgcattactgcaggggctgctgactactcaaaacttctcctgggactgttaataggcacaatggcagttatcaatggttttctccctccctgaccttgttaagcaagcgccccaccccacccttagtttcccatggcataataaagtataagcattggagtattccatgcacttgtctatcaaacagtggtccatactcccaacccttttgcattgcgccagtgtgtaaaatcacaggtagccatggtgtcatgctttatatacgaagtcttccctctctctgccccttgtgtgcccttggcccctttttacagactattgctcacaatctcaggtgtccatatttgcagctattaggtaagattgtgctgtctccctcttcccttccctctgccctgccccttttgcctctttgctgggtaatgttgaccagacaaggccctttctcttggacttaaacaattctcagttgcactttccttggtcccacccattatacatgaacccctctacttcctttcgcattgcttctgagtatgctgactacccaaagccccttctgtgttattaataaacacagtactgattgtcccatttttcagcccatcagtccaagatctccctaccactttggtgtgttggtgcagtgttgactatgaaaagcaggcctgaactaggtggataagccttcactcattttctttcatttattaatgatcctagtttcaattattgtcagattctggggacaagaaccattcttgcccacctgtgttactgctttactgtgcaaaatactgaaggcaagtcagacccagggagctggattgccatcctttattttgtgtttccagtgtacactataaaattgtctccccaggaaggaaggttggcactttctctgcattcttctttccagagcagattgcctggttaagaatctcttgttgtcccctttgtatattgttattgtaaagtgccaaatgccaggatacagccagaaaaattgcttattattattaaaaaaatttttttaagaaagacatctggattgtagggtggactcgataacctggtcattatttttttgaagccaaaatatccatttatactatgtacctggtgaccagtgtctctcattttaactgagggtggtgggtctgtggatagaacactgactcttgctattttaatatcaaagatattctagagtggaactcttaagaccagtatctttgtgtgggctttaccagcattcacttttagaaaaactacctaaattttataatcctttaatttcttcatctggagcacctgcccctacttatttcaagaagattgcagtaaaacgattaaatgagggaacatatgcagaggtgcttttaaaaagcatatgccaccttttttattaattattatataaaatgaagcatttaattatagtaataatttgaagtagtttgaagtaccacactgaggtgaggacttaaaaatgataagacgagttccctattttataagaaaaataagccaaaattaaatattcttttggatataaatttcaacagtgagatagctgcctagtggaaatgaataatatcccagccactagtgtacagggtgttttgtggcacaggattatgtaatatggaactgctcaagcaaataactagtcatcacaacagcagttctttgtaataactgaaaaagaatattgtttctcggagaaggatgtcaaaagatcggcccagctcagggagcagtttgccctactagctcctcggacagctgtaaagaagagtctctggctctttagaatactgatcccattgaagataccacgctgcatgtgtccttagtagtcatgtctccttaggctcctcttggacattctgagcatgtgagacctgaggactgcaaacagctataagaggctccaaattaatcatatctttccctttgagaatctggccaagctccagctaatctacttggatgggttgccagctatctggagaaaaagatcttcctcagaagaataggcttgttgttttacagtgttagtgatccattccctttgacgatccctaggtggagatggggcatgaggatcctccaggggaaaagctcactaccactgggcaacaaccctaggtcaggaggttctgtcaagatactttcctggtcccagataggaagataaagtctcaaaaacaaccaccacacgtcaagctcttcattgttcctatctgccaaatcattatacttcctacaagcagtgcagagagctgagtcttcagcaggtccaagaaatttgaacacactgaaggaagtcagccttcccacctgaagatcaacatgcctggcactctagcacttgaggatagctgaatgaatgtgtatttctttgtctctttctttcttgtctttgctctttgttctctatctaaagtgtgtcttacccatttccatgtttctcttgctaatttctttcgtgtgtgcctttgcctcattttctctttttgttcacaagagtggtctgtgtcttgtcttagacatatctctcatttttcattttgttgctatttctctttgctctcctagatgtggctcttctttcacgctttatttcatgtctcctttttgggtcacatgctgtgtgctttttgtccttttcttgttctgtctacctctcctttctctgcctacctctcttttctctttgtgaactgtgattatttgttaccccttccccttctcgttcgttttaaatttcaccttttttctgagtctggcctcctttctgctgtttctactttttatctcacatttctcatttctgcatttcctttctgcctctcttgggctattctctctctcctcccctgcgtgcctcagcatctcttgctgtttgtgattttctatttcagtattaatctctgttggcttgtatttgttctctgcttcttccctttctactcacctttgagtatttcagcctcttcatgaatctatctccctctctttgatttcatgtaatctctccttaaatatttctttgcatatgtgggcaagtgtacgtgtgtgtgtgtcatgtgtggcagaggggcttcctaacccctgcctgataggtgcagaacgtcggctatcagagcaagcattgtggagcggttccttatgccaggctgccatgtgagatgatccaagaccaaaacaaggccctagactgcagtaaaacccagaactcaagtagggcagaaggtggaaggctcatatggatagaaggcccaaagtataagacagatggtttgagacttgagacccgaggactaagatggaaagcccatgttccaagatagatagaagcctcaggcctgaaaccaacaaaagcctcaagagccaagaaaacagagggtggcctgaattggaccgaaggcctgagttggatggaagtctcaaggcttgagttagaagtcttaagacctgggacaggacacatggaaggcctaagaactgagacttgtgacacaaggccaacgacctaagattagcccagggttgtagctggaagacctacaacccaaggatggaaggcccctgtcacaaagcctacctagatggatagaggacccaagcgaaaaaggtatctcaagactaacggccggaatctggaggcccatgacccagaacccaggaaggatagaagcttgaagacctggggaaatcccaagatgagaaccctaaaccctacctcttttctattgtttacacttcttactcttagatatttccagttctcctgtttatctttaagcctgattcttttgagatgtactttttgatgttgccggttacctttagattgacagtattatgcctgggccagtcttgagccagctttaaatcacagcttttacctatttgttaggctatagtgttttgtaaacttctgtttctattcacatcttctccacttgagagagacaccaaaatccagtcagtatctaatctggcttttgttaacttccctcaggagcagacattcatataggtgatactgtatttcagtcctttcttttgaccccagaagccctagactgagaagataaaatggtcaggttgttggggaaaaaaaagtgccaggctctctagagaaaaatgtgaagagatgctccaggccaatgagaagaattagacaagaaatacacagatgtgccagacttctgagaagcacctgccagcaacagcttccttctttgagcttaggtgagcaggattctggggtttgggatttctagtgatggttatggaaagggtgactgtgcctgggacaaagcgaggtcccaaggggacagcctgaactccctgctcatagtagtggccaaataatttggtggactgtgccaacgctactcctgggtttaatacccatctctaggcttaaagatgagagaacctgggactgttgagcatgtttaatactttccttgatttttttcttcctgtttatgtgggaagttgatttaaatgactgataatgtgtatgaaagcactgtaaaacataagagaaaaaccaattagtgtattggcaatcatgcagttaacatttgaaagtgcagtgtaaattgtgaagcattatgtaaatcaggggtccacagtttttctgtaaggggtcaaatcataaatactttagactgtgggccatatggtttctgttacatatttgttttttaaacaacgtttttataaggtcaaaatcattcttagtttttgagccaattggatttggcctgctgttcatagcttaccaccccctgatgtattatttgttattcagagaaaatttctgaatactactagtttccttttctgtgcctgtccctgtgctaggcactaaaaatgcaatgattattgatatctaggtgacctgaaaaaaaatagtgaatgtgctttgtaaactgtaaagcacttgtattctactgtgataagcgttgtggatacaaagaaaggagcaagcataaaaaagtgctctttcaaaaggatatagtactatgcagacacaaggaattgtttgataaatgaataaattatatgtatatttgaggccaatttgtgtttgctgctctggtaattttgagtaaaaatgcagtattccaggtatcagaaacgaaaacacatggaaactgcttttaaactttaaaatatactgaaaacataagggactaagcttgttgtggtcacctataatgtgccagataccatgctgggtgctagagctaccaaagggggaaaagtattctcatagaacaaaaaatttcagaaaggtgcatattaaagtgctttgtaaactaaagcatgatacaaatgtcaatgggctacatatttatgaatgaatgaatggatgaatgaatattaagtgcctcttacataccagctattttgggtactgtaaaatacaagattaattctcctatgtaataagaggaaagtttatcctctatactattcagatgtaaggaatgatatattgcttaattttaaacaatcaagactttactggtgaggttaagttaaattattactgatacatttttccaggtaaccaggaaagagctagtatgaggaaatgaagtaatagatgtgagatccagaccgaaagtcacttaattcagcttgcgaatgtgctttctaaattataaagcacttgtaaatgaaaaatttgatgctttctgtatgaataaaactttctgtaagctaggtattgtctctacaaaattctcattgtatagttaaaccacagtgagaagggttctataagtagttatacaaaccaagggtttaaatacctgttaaatagatcaattttgattgcctactatgtgaactcactgttaaaggcactgaaaatttatcatatttcatttagccacagccaaaaataaggcaatacctatgttagcattttgtgaactctaaggcaccatataaatgtaactgttgattttctcacttggtgctgggtactaggtttataaaattgtatgatagttattatattgtgcaaataaagtaggaaaatttgaataacaatgattatcttttgaatacgcatacgcaagggattggttgtctgaagaatgccactatagtagttatctattgtgtgccaatctcattgctaggcattggggatgcaaagataaaccatctttattgtgtcttgggtagcagaagaaaatatgtgtaaaatcaatttataatttgtaaactgccacccatatataagctatatctgctgaatgatcattgattactcttatccttagagataacaactgggggcacaaacatttattatcattattgaacctacaacagagatctatgtgtagatttacaaagcctacagttctatacagataggaatgaactattggcttactgaatggtgattactttctgtggggctcggaactacatgccctaggatataaaaatgatgttatcattatagagtgctcacagaaggaaatgaagtaatataggtgtgagatccagaccaaaagtcatttaacaagtttattcagtgatgaaaacatgggacaaatggactaatataaggcagtgtactaagctgagtagagagataaagtcctgtccagaagatacatgcttcctggcctgattgaggagatggaaaatttttgcaaaaaacaaggtgttgtggtcttccatccagtttcttaagtgctgatgataaaagtgaattagacccaccttgacctggcctacagaagtaaaggagtaaaaataaatgcctcaggcgtgctttttgattcatttgataaacaaagcatcttttatgtggaatataccattctgggtcctgaggataagagagatgagggcattagatcactgacagctgaagatagaagaacatctttggtttgattgtttaaataatatttcaatgcctattctctgcaaggtactatgtttcgtaaattaaataggtctggcccagaagacccactcaattgcctttgagattaaaaaaaaaaaaaaaaagaaagaaaaatgcaagtttctttcaaaataaagagacatttttcctagtttcaggaatcccccaaatcacttcctcattggcttagtttaaagccaggagactgataaaagggctcagggtttgttctttaattcattaactaaacattctgcttttattacagttaaatggttcaagatgtaacaactagttttaaaggtatttgctcattggtctggcttagagacaggaagacatatgagcaataaaaaaaagattcttttgcatttaccaatttagtaaaaatttattaaaactgaataaagtgctgttcttaagtgcttgaaagacgtaaaccaaagtgcactttatctcatttatcttatggtggaaacacaggaacaaattctctaagagactgtgtttctttagttgagaagaaacttcattgagtagctgtgatatgttcgatactaaggaaaaactaaacagatcacctttgacatgcgttgtagagtgggaataagagagggctttttattttttcgttcatacgagtattgatgaagatgatactaaatgctaaatgaaatatatctgctccaaaaggcatttattctgacttggagatgcaacaaaaacacaaaaatggaatgaagtgatactcttcatcaaacagaagtgactgttatctcaaccattttgttaaatcctaaacagaaaacaaaaaaaatcatgacgaaaagacacttgcttattaattggcttggaaagtagaatataggagaaaggttactgtttattttttttcatgtattcattcattctacaaatatattcgggtgccaataggtacttggtataaggtttttggccccagagacatgggaaaaaaatgcatgccttcccagagaatgcctaatactttccttttggcttgttttcttgttaggggcatggcttagtccctaaataacattgtgtggtttaattcctactccgtatctcttctaccactctggccactacgataagcaggtagctgggttttgtagtgagcttgctccttaagttacaggaactctccttataatagacacttcattttcctagtccatccctcatgaaaaatgactgaccactgctgggcagcaggagggatgatgaccaactaattcccaaaccccagtctcattggtaccagccttggggaaccacctacacttgagccacaattggttttgaagtgcatttacaaggtttgtctattttcagttctttactttttacatgctgacacatacatacactgcctaaatagatctctttcagaaacaatcctcagataacgcatagcaaaatggagatggagacatgatttctcatgcaacagcttctctaattataccttagaaatgttctcctttttatcatcaaatctgctcaagaagggctttttatagtagaataatatcagtggatgaaaacagcttaacattttaccatgcttaagttttaagaataaaataaaaattggaaataattggccaaaattgaaaggaaaaatttttttaaaatttctctaaatgtaggcctggctgggctttgaccttttccgtttttaaatcactcacagagggtgggacaggaggaagagtgaaggaaaaggtcaaacctgttttaagggcaacctgcctttgttctgaattggtcttaagaacattaccagctccaggtttaaattgttcagtttcatgcagttccaatagctgatcattgttgagatgaggacaaaatcctttgtcctcactagtttgctttacatttttgaaaagtattatttttgtccaagtgcttatcaactaaaccttgtgttaggtaagaatggaatttattaagtgaatcagtgtgacccttcttgtcataagattatcttaaagctgaagccaaaatatgcttcaaaagaagaggactttattgttcattgtagttcatacattcaaagcatctgaactgtagtttctatagcaagccaattacatccataagtggagaaggaaatagataaatgtcaaagtatgattggtggagggagcaaggttgaagataatctggggttgaaattttctagttttcattctgtacatttttagttagacatcagatttgaaatattaatgtttacctttcaatgtgtggtatcagctggactcagtaacacccctttcttcagctggggatggggaatggattattggaaaatggaaagaagaaagtaactaaaagccttcctttcacagtttctggcatcactaccactactgattaaacaagaataagagaacattttatcatcatctgctttattcacataaatgaagttgtgatgaataaatctgcttttatgcagacacaaggaattaagtggcttcgtcattgtccttctacctcaaagataatttattccaaaagctaagataaatggaagactcttgaacttgtgaactgatgtgaaatgcagaatctcttttgagtctttgctgtttggaagattgaaaaatattgttcagcatgggtgaccaccagaaagtaatcttaagccatctagatgtcacaattgaaacaaactggggagttggttgctattgtaaaataaaatatactgttttgaaaactttgaaaaaaaaaaaaaaaa

SEQ ID NO: 65 - DNA, 4597 bp, Artificial Sequence
  GATAD1
aagtctccgcgtcccccccaccccggccagatccctttcccagtcctgcttcccagtgcctcgggccagggaatcctggcctccgcctgcggagccggcggaacccgcttcccgcctccacggggcagcgccagcggcctggtcctttcaccggcagctccgtgccgacgctctcaccgctcttcctatcgccgggagtggcgggccgaccagggggcggccgggctaccgtccgccattcccgtgtctctgcgcccgcgggggccgcccgagccggccaccatgccgctgggcctgaagcccacctgcagcgtatgcaagaccacgtcgtcctccatgtggaagaagggagcgcagggggagatcctctgccatcattgcactggccggggcggcgcgggcagcgggggcgcaggctcgggggcggctggagggactgggggcagcggcggcggcggcttcggcgcggcgaccttcgccagcacctccgccacccctccgcagagcaacgggggcgggggcggcaagcagagtaagcaggaaattcacaggaggtctgctcggctcagaaacactaaatacaaatctgctccggctgctgaaaagaaagtctccaccaaaggaaaagggagaagacatatatttaaattgaaaaatcccatcaaagctcctgagtcagtttccactataatcactgcagaatcaatcttctacaagggagtatattaccaaattggtgatgttgtttctgtgattgatgaacaagatggaaagccctactatgctcaaatcagaggttttatccaggaccagtattgcgagaagagtgcagcactgacgtggctcattcctaccctctctagccccagagaccaatttgatcccgcctcctatatcatagggccagaggaagatcttccaaggaagatggaatacttggaatttgtttgtcatgcaccttctgagtatttcaagtcacggtcatcaccatttcccacagttcccaccagaccagagaagggctacatatggactcatgttgggcctactcctgcaataacaattaaggaatcagttgccaaccatttgtagttcacaaattaaaactgggtttccaggcctggtgtggtggctcacgcctgtagccccagctattgcaccactgctctccaagctgggcaatggagtcagattctctttcttaaaaaaccacaaaaaaactggatttccagttctctaatattcttagtaccacaagatatgtcataggtatctttaaatgaaattcttagctggaaaagtgactaaaaagtttttctcctgctacctagtaataaacaaatcattgtttattactggtcacttagaaaattaaaagggatagggccaggcacagtggcttatgcctgtaattgcagcacttttagaggccgaggcaggcggatcacctgaggtcgggaagtggatcgcctgaggtcaggagttcgagaccagcctggccaacatggcgaaaccccgtcgctactaaaaatacaaaaattagccaggtgtggtggcatgtgcctgtaatcccagctatttgggaggctgaggcaggagaatcgcctaaacccaggaggtggaggttgtagtgagccaagattgcaccgctgtgctccagcctgggcaacagagtgagactcttgtctcggaaaaaaaaaaaaaaaaaaaaggctgggcacagtggctcacgcctttaatcccagcactttgggaggctgaggcagatggatcgcctgaggttgggagttcgagaccagcctggccagcatggtgaaaccctgtctctactaaaaatacaaaaattagccaggtgtggtggcgcacacctgtagtcccagctactcgggaggctgaggcaggagaattggttgaacccaggaggcggaggttgcagtgagcagagatcgtgccactgcactccagcctgggtggacagagcaagactccgtctcaaagaaacaaacaaaaaattaaaagggatagaatataatgaaatatattttgaacttaaattatattctatatgtgtatcttcctaggcaaaagctgtaatttccagagagaccattaggaacaggtagtatctatttttctccattatttatttctagaaactcataaaatggattgtatttttctataagaacaaaatattaattaaggtatagatgactgaccaagggcttaatcaaataaaatgactaacagcatctatcataaagccacacaagccttatgttctcatctcaaaaatgctgtgacagctttttggctgctttaaccataagaaaaatgattggtggatgattttattagcccaggcttttaaaaactttcatctaggccacgtgcggtggctcatgcctgtaatcccggcactttgggaggcctgagtggatggatcacttgaggtcaggagttcaggaccagcctggccaacatgatgaaaccctgtctctactaaatatacaaaaattagttgggtgttatggtgcatgcctgtaatcccagctactcgggaggctgaggcaggagaattgcttgaactcgggaggtggagattgcagtaagccgagatcgtgccactgcactccagcctgggtgatagagcaagactgtctcaaaaaagaaaaaaaagaaaaaattttaatttaatccttctgtagaaacaggcattcagaaccattccattgatcttaataaagctgctctttactgtttctagtcaaaaatgagacttcgatcaaaccataagattttatactgcagatagtcagcttcaccaaagccgcagaggaaacatgtcgagatcaggcttcctgcttgatagtctcttgactaccattaaaacgaatattgggaggtcatgaaagtcattggtaggccattagcattgatatctttaaaacatctaccctaaaccatctgctatggacccataataagaggcctgttgtatatgaaattgtctagaattcaggtgcaggtctttgccggttaagtaagggagcaacacgtaaaatgggagaggagtggggtgtactcacttgcctcctcttttgtcctgatttaaccagcatttttcaaccctgggaaaatttgcagaatctaagttgattgtaatgattttgagctgcagcagctttaactcttaccctttttccacatagttatggtgtttgagttggaaagaaacaactataggtagctacacgtacataattatctctttattcacaaagggtatagtaaaattgattgtaaataactttctaagtgccaatattcaaaacttttggattaaaatgtatttttcaccgtgcatttactttggatgtatttatttcatttaaacaatttaaatggggctctttaaccaaaaatggtatttaaaaccaaaacagtatcgtacttagaatttggagtagaggccgggcacagtggctcacgcctgtaatcccagcactttggaaggctgaggcaggcggatcacctgaggtcaggagttcgagaccagcctggtcaacatgaaaccccgtctctactaaaaatacaaaaattagctgggcgtggtggcgtgcgcctataatcccagctagtctactcgggaggctgaggcaggagaatcgctggaactcaggaggcagagactgcagtgagccgagatcgcgccactgcactccagtctgggtgacggcatgactccatctccaaaaaaaaaaaaaaaagattttggagtagattcatcattaataagtaacagattttaggaaaatcaaaaaatggctaataaaatgaacacaatgtaaaacatttattaaaatgtagacttttaaaaatctataaattgatcatctgtttataaattggcagatggttgtgtaccatcttttaaaataaagattgaatttcacccagtgtgatggttcccattgcttatatttctcctgctgaggccggacctgatatggccctggtctgtgttcccagccttgtttcctcattaccactaaaatctttcccctgtatgcccgcccaatttttctggctctgagtccttgttcatactgttctctccaattctaccttccaaaggcctttcttaacaccttcggattctttctttgagaactttccagattcccatgcctttttggaatcaatctctatcctattgtcatcacatttaagtttctacttccatcatcctcactcctatccctttggtcctgggatgacagggatgctgtgttttatttactcatctttgtaacttccacataacctaaccccggttcttgcttatgggagatgctgattgtagggtctgagttagatactgttaactaaaatgcttgttgatattttagttattaattcatattaactttggctgaaacttttaaattctattgtgaatagtcaagtaaaatttagattgttacattctgggttagtattagattgtttttaagattgttttaaacaagatgtttttaagatgagttttaaatagttctcttaacacaaataaagcttaatatgagtatttgaa

SEQ ID NO: 66 - DNA, 953 bp, Artificial Sequence
  C15orf48
gcgtgaccagagcgcgctggcccggcccacccggggcggttgtggtcgctatatataaggtggggaggccgccggcccgttcggttccgggcgttaccatcgtccgtgcgcaccgcccggcgtccaggtgagtctcccatctgcagagacgcggacgcgccggcccgcagttggcctgcggagcgcggtggacggtttggcgcccaccaggcgatcaatactttggatttttaatttctagatttggcaattcttcgctgaagtcatcatgagctttttccaactcctgatgaaaaggaaggaactcattcccttggtggtgttcatgactgtggcggcgggtggagcctcatctttcgctgtgtattctctttggaaaaccgatgtgatccttgatcgaaaaaaaaatccagaaccttgggaaactgtggaccctactgtacctcaaaagcttataacaatcaaccaacaatggaaacccattgaagagttgcaaaatgtccaaagggtgaccaaatgacgagccctcgcctctttcttctgaagagtactctataaatctagtggaaacatttctgcacaaactagattctggacaccagtgtgcggaaatgcttctgctacatttttagggtttgtctacattttttgggctctggataaggaattaaaggagtgcagcaataactgcactgtctaaaagtttgtgcttattttcttgtaaatttgaatattgcatattgaaatttttgtttatgatctatgaatgtttttcttaaaatttacaaagctttgtaaattagattttctttaataaaatgccatttgtgcaagatttctcaaagattaggtatatatttaaatggaagagaaaatatttttatgggagaaaaatacatttgaaccatgaaatttcatcttttaaataacatccagtacagatttctgtgtaa

SEQ ID NO: 67 - DNA, 3782 bp, Artificial Sequence
  CSGALNACT2
ctctcaggcgcggcggcgcgcccgggggtgggtggctgaggcggcggcgggcccaaggcgtgaggcgccgcccgggtgtccccgcggcgcaggaggcggtggagcgcagagcgggcgagcgcgaaaaatcactaccaatataatggattttatatatcagattgctttattctggatatcatggtaacaatacagaaagtatacataatttcccatttctgcaagtagtcatgactgctgaagaaagaaaaacttaaagctacggcagaattattttatggaaattctgattttgtttttaatttttgataactttttactaaaggtatgaacacacaaagagcttattttgttaggcaaatacacattaataagaatgcctagaagaggactgattcttcacacccggacccactggttgctgttgggccttgctttgctctgcagtttggtattatttatgtacctcctggaatgtgccccccagactgatggaaatgcatctcttcctggtgttgttggggaaaattatggtaaagagtattatcaagccctcctacaggaacaagaagaacattatcagaccagggcaaccagtctgaaacgccaaattgcccaactaaaacaagaattacaagaaatgagtgagaagatgcggtcactgcaagaaagaaggaatgtaggggctaatggcataggctatcagagcaacaaagagcaagcacctagtgatcttttagagtttcttcattcccaaattgacaaagctgaagttagcataggggccaaactacccagtgagtatggggtcattccctttgaaagttttaccttaatgaaagtatttcaattggaaatgggtctcactcgccatcctgaagaaaagccagttagaaaagacaaacgagatgaattggtggaagttattgaagcgggcttggaggtcattaataatcctgatgaagatgatgaacaagaagatgaggagggtccccttggagagaaactgatatttaatgaaaatgacttcgtagaaggttattatcgcactgagagagataagggcacacagtatgaactcttttttaagaaagcagaccttacggaatatagacatgtgaccctcttccgcccttttggacctctcatgaaagtgaagagtgagatgattgacatcactagatcaattattaatatcattgtgccacttgctgaaagaactgaagcatttgtacaatttatgcagaacttcagggatgtttgtattcatcaagacaagaagattcatctcacagtggtgtattttggtaaagaaggactgtctaaagtcaagtctatcctagaatctgtcaccagtgagtctaattttcacaattacaccttggtctcattgaatgaagaatttaatcgtggacgaggactaaatgtgggtgcccgagcttgggacaagggagaggtcttgatgtttttctgtgatgttgatatctatttctcagccgaattccttaacagctgccggttaaatgctgagccaggtaagaaggtgttttaccctgtggtgttcagtctttacaatcctgccattgtttatgccaaccaggaagtgccaccacctgtggagcagcagctggttcacaaaaaggattctggcttttggcgagattttggctttggaatgacttgtcagtatcgttcagatttcctgaccattggtggatttgacatggaagtgaaaggttggggtggagaagatgttcatctttatcgaaaatacttacatggtgacctcattgtgattcggactccggttcctggtcttttccacctctggcatgaaaagcgctgtgctgatgagctgacccccgagcagtaccgcatgtgcatccagtctaaagccatgaatgaggcctctcactcccacctgggaatgctggtcttcagggaggaaatagagacgcatcttcataaacaggcatacaggacaaacagtgaagctgttggttgaaatcataattaatgcgttactgtatgaaccacaaaacagcactatttatttagccttacttctacttccagatgcagtgcctcttttggagaagacatgtttatttttcatgttctttctgacattactttagcaattcaacttgatgtgagaagaaaaaacaaatgtttcaacacaaaatctctgttttgtgagaatactgcactatggaataattgacaaattgaaatctcatatttgtcccaaaagttgttttgagttagttctacctggtgcccatgttctgattgtgtgtgggattgcatggtgtcctgattgcatctaggtggagcggatggaatgtgctgggccactgttgggtggagagcagcacattcttacagaggagatggagcgttatgagcatagtatgtggataggtatcttcacctgcccgcccctgagtcagcctccttgacttgatagcttgaagaatccttttccactgaaatagaggataattaattgacacatctgaaatccccaatcaatcaatcaagagaaaggtagaactaaaaactccttaacttactgttgcttacacccctgaaagtctgtttttaagcaaatgggtaatagtagaaaataggttagaatctatggcttgattaaaaatatgttattacattatcatgttcaggattaggattagtagtcagttgctgtaaactattttgaacaaacagaaaagaacacggaaacatttttaacagagcatttaattatgttggaatacaggatcctagctctgtctgggaacattagtttatttgagccagctctatcagggtcttcccatggtggttcagaatagatgagcatagcatggttttgtttgtttttgctttcaattttctaatttggcatggatccatatgtatttactatcctttttctaatatattaatatatgctacatttgtatttgcattactataatactttgagttgaaaaagagtttcattgtggagagaaaaagcaaatggtatgccacaagatcactctgatttgagaaaagggaggaggggaagatagtctgaatggaaatctgaaatacggaatgttttagagaaatatgtcacttgcatatagaatgttttaattgaggtataaattaatgagacaaagtgaaaaagaaattatattcagataggactgcactacattatttgtcacacatggatctgttaccatcaggtcaattcctagtatgcataaattttttaacccttttaaaagagacctatgttgaaaacccctgaaaattcactgaagaaaaatcattactctttttctcagtaaatcatatcatctgaaatattacaaatttcaaatttctaggtgctatattaattcaatattacaataactcttacctaattattcttacaagttttaagttgtggtagtttagtgatttttttaaaagatgtgtgaaatgttctctgcaaaataattcaggccactgtctccttttatatattattataattatttattatgaagaccagtgaattacgatatttaaagtgagagaacttaattatttgcaaaggtaagttacagcttgttttttgagagaatcaaatgagtttacttttgttcctgttgtttttaactagctttaagtttaaagatggaagctaagcaatggaaatgctatacgtttttgacatttattaaatggtaccaataaagtattttattaccaaaagttaaatgaaaaaaaaaaaaaaa

SEQ ID NO: 68 - DNA, 3535 bp, Artificial Sequence
  SOX2-OT
aaaaatgttgaatatcaacaatgggtttcagtgctgtattgttgagttttgtatgaactaatctagcttctctaaaaaaaaaaaaaaaaaaaaaaaaaagaaagaaaagaaagaaagaaaagaaagaaagaaagaaaaaaaaagaaaagaaaaaaaagagaaccacagctttggacaaaagtctatagccagtgcatttgaaaactccccttgcaccagggctgactgtagctgggggaagacattttactcatttgctctttcctttcatacagtcagctggtccctcttctcaggtgtagatcacctattataattttacctaattttgatactctgataaggaaagtcccaggacttatcagctgggataggcctcacttacaagacagctctgttcagtatttggaagaaagcctgacaggtttcttcggaaaagtggccatccatggaatgaatgaaatgttctctttctattccagggattgcagtggcaaagctaggctaggtcttggaggctggtgtaaggcgatgtgggtgaaggcaggaggctgatggaaagactggggggaagaaaagccgaaatggattcacggtgccttggatgaaggacgagaggggaactgcaagctccttcaactggttctgtccggtgagaagtgatcaagcttgggctgacaagaggctcagggagccctcacgttctttcgcttttttacctgccaatcaaactgctacaagacaacaccctgatctggcatggacatcgcgggtccaagcctgtagccccaaatcggataatctctgcagctgataacaagcaaaagagaagccaggcaacagccatattaaagaagaaaacaatcaactctgagatccaacttagaaataatgtttcattcaagataaggctcgtggcttaggagattgtgacctggcttgcatcattctaagacttctatcgtctgttttcaaaacccaaggaggacctccttttctgtgtgatagttcctcatgctttgccagccactgggtctttaaggaagcttgccaagagttcccggctgggaaggacagttcgagttcatcatagacaatgagctggcaccacagtttaagtgactcaccaacctggttgcccacttcaaaatgtcaagaaccacactatctaattgaaagaactgtgttttagcaaagtgtaattggatcgcctggcaagatcatctcaaactatgtctctgaccttgcctttcagtggctattttgagcacaagaggagaaaggaaatgattcctgaattatatcttgtttttaaaaattaagattaattaatacttggttttatgttcattccattgtaggaacttagtgattattacaaaacagtcaaaataggtcatagcaaaatgaacgtttaagattaggttaaaacattcctctgaaattttagtattcacttttgaagtgtcaattactatatttctgtaatttctcatttttttcttggcttagagtcaagatgaaaaatgatatttgaatcaaagacattgttttgttatatagccactcctttctaaaatgcaaatccaccctcccctcaccaatgctttattctttgtgcgcgcacacacacacacacacacacacacacacacacacacacacagacatacacagaaccagcacccaaatggtagaggaggtccttccaagacttctaggacctggatcatgtaagcagtagatgagaaaatgaagtaagagatatagagtaataacaataaaagtcaatgatttcattttacaaaaaagtcattgtgtagtactcagatatttttaagagcaagtattattatgactaaagtatattatacttctaaattattatgattctcatctaatttcaagccacacataggcgccatttgaaagcattttgtgttacaacctatcaacaaaaatcaactaatagttttataacgtgcataggtttaccccatggggaattaaaatttttatctgcaagtatttctgttgttgtgagactttaggacaagacaacatttggtgttaacatagaagaatattctatggcttttttagctttaaagttcattactctaaaataaagtacacgtggtatttttttcttcctagtgttctcttattatatgtagagtattttcggttgttgtttttaacgtatacattatttttattaagtcatttcataaaagataagatatatactaatagacccttggttttctcctaatttaattatttcaagtcaagcaaaattgggcaattttctttcaggaaaaaaaaaatattgagcatgattttgaggtaaaactgattatttacagcatcttttctctaataggctaacatttatgatggatcttatttcaaagttgattattctcaaagaaaagtggagatattagaatttccgagtaaattgcattgttttaaaaagtactttaatgcattgttcacattgttgccagctattgaccaaaaaagagaagaagaaaaaagaaataaaaaaagcagtatctgctccaaacgtcaagttttgcagtttgaaagacttgtacattataattgtttttttcttttttggaaagcagtagtaattaataccaaaggcatagacaatttagggccataacctcccttcccccctctccacctttttttttttttttttttttttttaactttaaccatgataggcatctctgcaaggtaggttttaacatatttttttcctaatttttttccctccattcagtaagaaggataagcttttagagtacccagtcaccgtggtaactgccaaaaaaattctcctgaagtttgaagaggtcagctagcagggtcaacaaccctggcctctctctgagctcggtctagcatgccccagcctgcggttggagtgtcaggccagatctgaccctgggaggtggaccattctggctctgatataaatttttcgagtcagttcatggcctggactctccaggtggcctccaaaatcgattttgaccccctgaccctgtctcacggaggcatagcatccaccctaagtaaggatttagccaggaatgacagctttccactgagtgttattggggacagtataaacagtttggaaagcaagtaaggaggtgtgagggctagcaatcattaaaagcacattaaaaaacaatttttaaaaatctttattagagaaagttgtaaatgcatatctgttacagaattcctgtgatttgtagagttttctagtcagttttgaatataaataggtcacatatctttatctttttgcatactttgttacaaatatgcaaataagataggcatacttgctacaaaataggtacagcaggaatgtaatatgttcagaaaaggcaaactggttattaaaacacattaacaggtaaggagtttctaatattttaaatactaaaattttacatgtgtattttgaagtttttaaaatggaaaaataaagaacctttaaaaa

SEQ ID NO: 69 - DNA, 2829 bp, Artificial Sequence
  C16orf58
acgtccaccgtgcggcaggggcggggctgggatccaaaagctcggcatggctgacgacgcgggtttggagaccccgctgtgttccgagcagttcggctccggggaggcacggggctgccgcgccgccgcggacgggagcctgcagtgggaggtcgggggctggcgctggtgggggctctccagggccttcacggtcaaacctgaaggacgagatgcgggcgaagtgggggcttccggggccccctcaccgcccctctccgggctccaggccgtgttcctgcctcagggcttccctgatagcgtcagcccggactacttgccctaccagctgtgggattccgtgcaggcgtttgcttccagcctctccggctccctagccacccaggcagtcttgctgggcataggggtggggaacgcaaaagccactgtttcagctgccacggccacctggctcgtgaaagattcaactggcatgctgggccgcatcgtctttgcctggtggaaagggagcaaactggactgcaatgccaagcagtggaggctttttgcggacatcctcaatgacgtagccatgttccttgagattatggctcctgtatacccaatctgtttcaccatgaccgtctccaccagcaacctagccaagtgcatcgtgagtgttgctggtggggccactcgggctgccctgaccgtgcaccaggctcggaggaacaacatggctgacgtgtcagccaaggacagcagccaggagacgctggtgaacctggcggggctcttggtcagcctcctgatgctccctctggtgtcaggttgccctggcttcagccttggatgtttcttcttcctcactgccctccacatctacgccaactaccgcgcggtccgagccctggtcatggagaccttgaacgaaggccggctccggctggtcctgaagcactaccttcagaggggagaggtactcgacccaactgcagccaatcgcatggagccgctgtggacaggtttctggccagctccgtctctatccctgggggtccccttacaccgcttggtctccagtgtctttgagctgcagcagctggttgaggggcaccaagaatcctacctcctctgctgggaccagtcacaaaaccaggtacaggtagttctgaaccagaaggcaggccccaagaccatcctaagggccgccacacatgggctgatgcttggggccctgcagggagatggaccccttccagcagagctggaggagctgaggaaccgggtgcgggcaggtcctaagaaagagagctgggtcgtcgtcaaggagacacacgaagtgttggacatgctgttcccaaagttcttgaaaggactgcaggatgccggctggaagaccgagaagcaccagctagaggtggatgagtggagggccacatggcttctgtctcccgaaaagaaggtcttgtgagcagcccagacggaggcccaagcccagggcaggaacctggagcaaggacactttggccacagcaggacaggggaaaggcagctttatttttccttagggcaactgcagcgggtgggccaggccctcatgggaagtgactgccaatcagatgcagtgggccccaggcagaggaaggccgggagaaggggagccaggaccttctcaccccactgccccttccccttttctggggagcaccgcaggctcctcacccccacttcctgtgaggctgtggcttatggtgtccaacgcagttggtcttaggcatagaagccccagaggaacacggccactgccatcatgagcagggcattgaggttgaccacacgggcccagctcgggtcctcgctgatgtcctccagccgcctggctgctgccgctgcctcctcctgggtaaggggcggaggactgcccaccccacctctgctcattccacaaaaccagagcaggcactggcggaagaggcttggtgccggggcctggggctctgagggaaattgaggccctgcagttagtttgcgggaactcagctcctccagccccacctcccagcatggtgccctaccattcatctccatggcactctctgggcacccattctgtacagggagtgaggagccttgctgctcatcagcatccaggtcctcccgttcctccttgctatgccggagactgaagaccaggcggtggagctggggagggtgggagcacgaacgaggtgggagttctgtccccccatgcctggccctaaagtctcttgcacaccagctcgtcactgcctgccctacccacctctgtccagtctacacacccagcccaggcttaactcatgccaactccaccctacatggctgccctgtgccctcgggataaaccccaagcccctgagcttgtgtttaaagccgttggccttgctcccccagctttgtcagctcaggtctgtctacacccagatggtagcgcttgtgacactggcctggcagtcctgctcacagtgttctgtgcctgtgtgctcccaccctttcctcctgctgctgcagaaacccggccatccttccacacccagatctcttgtcctgtcctcaccccaccctgccaccatcagccctgcctggagccacctgccctttggcaacaaaaccaaacctttttgtgggcgttcaagatggtattgtgcccaccagtcagatcctgtgttttgagtcccaaaggccatgccaaggattggctttgggaggctttaatcaccaacccatcaacatcaagcctcccccaggccggttcaaataaatgtatttaaataaaaattcttgctcggcaaaaaaaaaaaaaaaaaa

SEQ ID NO: 70 - DNA, 2356 bp, Artificial Sequence
  ACKR4
gtaaagtgaaaacaaaagtagctggagttaggtcatttgattttatactctgtactcaagactgctcctctctgccgactacaacagattggagccatggctttggaacagaaccagtcaacagattattattatgaggaaaatgaaatgaatggcacttatgactacagtcaatatgaactgatctgtatcaaagaagatgtcagagaatttgcaaaagttttcctccctgtattcctcacaatagttttcgtcattggacttgcaggcaattccatggtagtggcaatttatgcctattacaagaaacagagaaccaaaacagatgtgtacatcctgaatttggctgtagcagatttactccttctattcactctgcctttttgggctgttaatgcagttcatgggtgggttttagggaaaataatgtgcaaaataacttcagccttgtacacactaaactttgtctctggaatgcagtttctggcttgtatcagcatagacagatatgtggcagtaactaaagtccccagccaatcaggagtgggaaaaccatgctggatcatctgtttctgtgtctggatggctgccatcttgctgagcataccccagctggttttttatacagtaaatgacaatgctaggtgcattcccattttcccccgctacctaggaacatcaatgaaagcattgattcaaatgctagagatctgcattggatttgtagtaccctttcttattatgggggtgtgctactttatcacagcaaggacactcatgaagatgccaaacattaaaatatctcgacccctaaaagttctgctcacagtcgttatagttttcattgtcactcaactgccttataacattgtcaagttctgccgagccatagacatcatctactccctgatcaccagctgcaacatgagcaaacgcatggacatcgccatccaagtcacagaaagcatcgcactctttcacagctgcctcaacccaatcctttatgtttttatgggagcatctttcaaaaactacgttatgaaagtggccaagaaatatgggtcctggagaagacagagacaaagtgtggaggagtttccttttgattctgagggtcctacagagccaaccagtacttttagcatttaaaggtaaaactgctctgccttttgcttggatacatatgaatgatgctttcccctcaaataaaacatctgcattattctgaaactcaaatctcagacgccgtggttgcaacttataataaagaatgggttgggggaagggggagaaataaaagccaagaagaggaaacaagataataaatgtacaaaacatgaaaattaaaatgaacaatataggaaaataattgtaacaggcataagtgaataacactctgctgtaacgaagaagagctttgtggtgataattttgtatcttggttgcagtggtgcttatacaaatctacacaagtgataaaatgacacagaactatatacacacattgtaccaatttcaatttcctggttttgacattatagtataattatgtaagatggaaccattggggaaaactgggtgaagggtacccaggaccactctgtaccatctttgtaacttcctgtgaatttataataatttcaaaataaaacaagttaaaaaaaaacccactatgctataagttaggccatctaaaacagattattaaagaggttcatgttaaaaggcatttataattatttttaattatctaagttttaatacaagaacgatttccctgcataattttagtacttgaataagtatgcagcagaactccaactatcttttttcctgttttttttaaatttgtaagtaattttataaaatccacctcctccaaaaaagcaataaaaaaaaaacaaactataataagcttttctgattcttttcaaaacattcctggtaagttcctaaagacataatttgcttctatgatgtcaactttcttactaataactggttatcatgacaaatgttaggtttatcatatatagtctaggtgtaatcctcagactatcattttcatctgggttccaatttcttaacttcctaaagaattcatctgtttatacaagtctaccactgccgattgactaaaaaatacattatcccatgcataaaatgtcctattttcatttaaacactttatttttgagtaataaaaatatgtaccacaataaattattgttaattaacatgtacagcttatcttttttaaaaaaatttgctgtaaattattataatccatgtaatatgctcctactaaaattaaattttgctagcaattacattggtcaaaaaaaaaaaaaaaaaa

SEQ ID NO: 71 - DNA, 2318 bp, Artificial Sequence
  P2RY12
actgttgttacacaacaaacatcatagtgctgaaatgacaaaaatccagggtagtgatcacaatcagaagacaggagctgcagaacagaacactttctcatgtccagggtcagattacaagagcactcaagactttactgacgaaaactcaggaaatcctctatcacaaagaggtttggcaactaaactaagacattaaaaggaaaataccagatgccactctgcaggttgcaataactactacttactggatacattcaaaccctccagaatcaacagttatcaggtaaccaacaagaaatgcaagccgtcgacaacctcacctctgcgcctggtaacaccagtctgtgcaccagagactacaaaatcacccaggtcctcttcccactgctctacactgtcctgttttttgttggacttatcacaaatggcctggcgatgaggattttctttcaaatccggagtaaatcaaactttattatttttcttaagaacacagtcatttctgatcttctcatgattctgacttttccattcaaaattcttagtgatgccaaactgggaacaggaccactgagaacttttgtgtgtcaagttacctccgtcatattttatttcacaatgtatatcagtatttcattcctgggactgataactatcgatcgctaccagaagaccaccaggccatttaaaacatccaaccccaaaaatctcttgggggctaagattctctctgttgtcatctgggcattcatgttcttactctctttgcctaacatgattctgaccaacaggcagccgagagacaagaatgtgaagaaatgctctttccttaaatcagagttcggtctagtctggcatgaaatagtaaattacatctgtcaagtcattttctggattaatttcttaattgttattgtatgttatacactcattacaaaagaactgtaccggtcatacgtaagaacgaggggtgtaggtaaagtccccaggaaaaaggtgaacgtcaaagttttcattatcattgctgtattctttatttgttttgttcctttccattttgcccgaattccttacaccctgagccaaacccgggatgtctttgactgcactgctgaaaatactctgttctatgtgaaagagagcactctgtggttaacttccttaaatgcatgcctggatccgttcatctattttttcctttgcaagtccttcagaaattccttgataagtatgctgaagtgccccaattctgcaacatctctgtcccaggacaataggaaaaaagaacaggatggtggtgacccaaatgaagagactccaatgtaaacaaattaactaaggaaatatttcaatctctttgtgttcagaactcgttaaagcaaagcgctaagtaaaaatattaactgacgaagaagcaactaagttaataataatgactctaaagaaacagaagattacaaaagcaattttcatttacctttccagtatgaaaagctatcttaaaatatagaaaactaatctaaactgtagctgtattagcagcaaaacaaacgacatccaattgtcatgctgcatgcaaaactacacagaattcatgttttgcagagttttgccaaaatgagtaatcatataatatttactgtaatttttaaaatacattatcgttcacaattttattttttcataatcaactaaggaagaacgatcaattggatataatcttcttaccaaaaatgatagttaaaatgtatatatatcctagtcccctaaccaaatcctgacctattgggatacttataaaaatttaagtaagtgggatacacaaagaataataactattaacttttcattattagcaaaaacctaagggatttaaactaattgaaactgtatttgattggacttaattttttatgtttatttagaagataaagatttaaagaagacctttacaataaagagaagaaatatcgaagtcattaaaataaggagacttacttttatgacattctaatactaaaaaatatagaaatatttccttaattctagagaaactagttttactaattttttacaacttcaataataccatcattgacacttacctttattaattagcttctagaaaatagctgctaattaggttaatgaacattttaccttagtgaaaaaaattaattaaatatgattacaaagttgcacagcataactactgagaggaaagtgattgatctgtttgtaattacttgtttgtattggtgtgtataaaatacaaaatttacattaaactctaaatcattaaaaaaaaaaaaaaa

SEQ ID NO: 72 - DNA, 1408 bp, Artificial Sequence
  LOC101927513
acttcattttgtcacactctggcttgtaattatctcataatgtctgcagatgctcaggaggaaagttaatgagatttccactgtttgaagttttaacagggtttctaatgggaaaatgggaagggagaagttttctattaggtaaaaaatagtgctattctcaaatggattctcccatttgcagggacaaggaaaactttaattttcaatgcccccatgacaccccaggaataatctaaagtttcctatactctaaggaaacttcagtaacggttttaagcaaatactttatttctaatcaaaactttctttctgaacatttgccctcgcattattcatttattcacccaagaaattatttggaagctctaagctctcattgttcctcacagcatttattttatcgtatcaaaggttaaaacttggattgcaatcttagaggaaaattaattcagtgattaagaaaaatgcactttaagcaatacacatttaaataactgacaggcatggggcaatgtatttctgaattttgttttttggaaaaacacttttttctacttaaaattttaggcagctgcaattcttctaccctatagcctggagaaacagcatgaattactaataagggagcaccaatctgcagtgcagtgaccactttcagaacaaaagggtgaaagctaaaaccagaaaaatagattttttaaaatctactggttgcttaaagcatatttggaccttggctgtacttgagaacattttgcaatattctaccatccttgagcagaaggcatttggccccagagactacacttccaaataaagaaatgttcatttatatactaccttcaatgcttgacaaaatgtttccatcctctacgttggaactcaggatcccattaacttatgaaatatatatttaagatttaagttttatgttactgaccttttgcttaaacagctttaccagcatcagtattagaaaggaggagagtacaaacagtgcaataatagaggtgcttttaaggaaggaaagggcttctggagactcatgcctggattgtgcatctgccccggagcagaatggaacagggaatttccccctgccctggtaactggaagaaatgacacatcaaaacatttgctcagtgcctgacagagacccagcaacatctgttcttgtgcattttaatgatcatgcctccagcttcctgatattttcctggaaggaaaataaattccaggatacgaaaaaagcatatcctaaggcagaagtattttactagttaaaacagcataacagtacaatgacaacctcatctccagaagggatttcttgacaaattgatataactcaactttggacttggtttcagctttgtccattcaaataagtaattagtggattaaa

SEQ ID NO: 73 - DNA, 2590 bp, Artificial Sequence
  LOC100507642
attaatcgtccttatatgtactcgggaacgttcgtcctttaggttttctcctggcgcatgggcgccgccaatcatttcggggcttattttggttctaaagcccggggcagccaggcctccctgcctggcctcggcggggacgcgggacctggggccccggaccgggcctaaccgccctggccggtccccactgatggtggcggtcggtcctgatcgtcctgatggcagcgaccaggctggactcgggctgtgcaggggcgaggggagcagggcggggtgacgcccggagagcggcctggagagcgcgtgcttcagaaggcgtgggcaccctgtcccctttgcagatggggatgcaggccctggtggcggtggaggggagatgggggcagggacgttgccgggcagaggaagctggccattcctgggggattcctgggagccatgtgggagaggcgtgaggaagtgagaccttcaccccgagacaggtcctgacacaccctctggtgcctctactcaagtgagaagtttggctgctgtaactgactgggaagcttaaaataacagacaatcatctctcacatttatggggactgggaagtccaagaccaagttgccatctggggagggcctgttcctcacagcgccttccagctcaggcctcgtttataagggcactcaagccttccacgacaacgggtcctcatgacttactcacctcggaaagccccacccccaagaccatcacattgtgggtgatggcagagcataaggtgccttccccacatgctcgggttggcccagcgtctcacgctagcagctacgtggaatagttattttttctggagaactctgggacccctctgatgtcttggagcacccacacaggccgttcactgtgcacgctgtgaggctgtcgtcttggagcacccacacaggccgttcactgtgcacgtggtgaggctgtcctctggggagttctgctgttgtatgggttctgtctgtgtcaatgtcccagcgggaacgcagggcacactagcgtcatccccagagggcttggtaaggggactgtttgcagagacataggcagagggctggaaaactaccaaaaaagtgcagtgttctggacctaataatagcagagctattctcaccctggtctgaaggcaggaggggaggagcagttaatggattctggaagtcaggttgcacagagtcaccttgaaagatgccatgaccttcaccgagggccagacagagactaagatgaccccataggagaataagacctagacctcatcctcctgcctcctgccagtccctgccaggggtcgccaatggcaaaacaggactggaagccagaggccatggaagcccatggatgaagtccacaggccagcctccccgagagcagcctggacggtccgcaggagacgtctcctgtcttaggcgtcccacgccgcgtgctcctgttcagccctgccgaggtggaagcttggagtggctcacggtggatgcattgacgctgcagacgccagcaagtgctacaaaccagagctggcctttaactcagactgatggagaaggtgttaataatgcagattagacttaaaagtgttgaagccattgcactgtgaacagcaaaaaaattgaagaactcttctggcatttaaaaacaattactcagttcagcagagaagtcactgacaaacgagatcacactgactgctttgtcgttttggttttgtcttactcattaatgcaaataagaacattcactagcatctgtgtcgggcctaccctccctggtcaaatacagctacagtctccctgcagaaacgagttttccagaaatgagccgatgttttctgcgagaatcaattggtcatatacaatttacaaaaatgagtactgtatactatatttgtaaactgtacactgcagatgctttatttcactgaaatttataatacacttatccatgtatatgcatgcatgcatttttgttcctgagatccagctgtgaaatgtttaccagcacataaattaccagcacatgctcttttttgttaacctactaggtaaaatcttcatttattacatcaaattcttgtagtttttgtattgcaattatgcagatattgattatcgcagtattactgcaattatacagataccacaatttcagatattgatcagcgtgttcagttggtttctaaggaggtttacttacctcatggtacacctagtttgcatagtttgattatatttaactcttatgctaattgggggaagtcattgatttattggacagatgcacctgtggtcttccctgagcacatcctggccaaggatgctgcccccaggagatttgagaagtcctgtaaggatcatatcagtattttcaaatacttatagaaaagccagagggattgacccagaattaccaatataagcttgaccctgagataacaatgccattttatgtttgcatgcataaaaccaatgcaagaggctgatgactccagatcccttatataagccaataaaaagtagtttcattttttatttcatttaaaaaaaaaaaaaaaaa

SEQ ID NO: 74 - DNA, 659 bp, Artificial Sequence
  LINC00844
gtgagccatgccaatgtggtttggctggactgtgagtgcttgatgcagtctgataggaggatgggggtggcgcagagaacattgaaatcagaaaggattctgctctgtagagacaaaggaaacacagagacatagacatggatctgggaaatacaccttttgctactcgttcagttttagcaaggaggtttcttgcatggctaagcaaaacttaaacttcctctgagaattacaggaattacaggacctgacaaagctatgaagattaaaacctataggaagaaaatctgaaccagaaacagtatggcagaattgggatctgactcacagagggaagaacttataattcttcacaggtcacatagaagcatgagaatttgggttcaagcaagtaaattctaaatcagaatccatacataaagtgtttgcaatgtccagttatatctccatgatattttctttgtggaagttgattgttcttccttacaataaattgcttgaattgtctgtctattcatttagctatttcttttcttgtctttgcgatatttttttttgtaagtaaaaaattttcagactaaataacagggtgtaattttttgctttgtttctcctaagttttgtcttgtttatgacattaataattttctaaaatctct

SEQ ID NO: 75 - DNA, 10619 bp, Artificial Sequence
  AMER2
aactccaccccggggagctgttgtgcttgcattgctgggctgctgatagactgattgagtggtggcgtgtacttttgtcacaagaaccataaccacaatgacagccacacagcatggacctagcgtgtgctcagctctggacaagacatggatgtaggcagacatgcttcctgcctgctgggcttagtgcaccaatgctaaggacagacatgaagggcttgggaaaggcatgaagatgcagggagtctaggagagaggataagaaaaacaagcattttgtggtgggttgaattgcgttgtcgtttttagaggcatttcgtgatccatggttgcgctcccgtgaagagcgagtctagagaaggaatccgaaggtgggtgagagttgagggaatttgaattccataattacgactcgaatttctgcaatcagctcgcggctgtgttgcctgctcctgccacaaaaacgccatgcagcgccgagccaagtcggatggaagtgggttagggtattatataagcccttgcgggagggaagatggtcttttatgtgtgtttcttttgcagcggcggcggcgagcgcggctcaggttgatttagaatacgggtgacagtggcctggcgcgagcccactgctgacgaaagcggcttatcccgcgcggtttccatggagacgagccggagccgcggcggcggcggggctgtcagcgagcgcggcggagctggcgcgtccgtgggggtctgcaggaggaaggcggaggccggggccgggaccgggaccctcgcggcagacatggacttgcattgtgactgtgccgccgaaacgccggccgccgagccgccgtcggggaagattaataaagctgccttcaaattattcaagaagaggaaatcgggtggcaccatgcccagcatttttggggtcaaaaacaaaggggacgggaaaagctcgggtccgacggggctggtgaggagcaggacccacgacggacttgccgaggtgctggtgctggagagcggcaggaaggaggagccgcgcggcgggggcgacagcggcgggggcggcggggggcggccgaacccggggccccccagagccgcagggcccggcgggggctccctcgccagcagctcggtggccaagtcgcacagcttcttctcgctgctgaagaagaacgggcgctcggaaaacggcaagggagagcctgtggacgcgagcaaggccggcggcaaacaaaagcgggggctgcgggggctgttcagcggcatgcgctggcacaggaaagacaagcgggccaaggcggaggccgcggaggggcgcgcgcccgggggcggcttgatcctacccggctcgctcaccgccagcctggagtgcgtcaaggaggagacgcccagagccgcgcgcgagccggaggagcccagccaggacgccccgcgagacccagcaggtgagcccgcagggggagaggaggtgcccgcccccgccgaccgcgccccagcgcggagctgccgagaggcagagggcctcgcgcaccccggcgacaccggcgcccggggagaggacgccgcggggcatcggcgcgccgagccggggcccggggaggtccgcacggcagaggacgcttccaggacgggggccgttcccgtaaagacggtcccccttgtcgactccgaaggcggcagcggccgggcgcccgccgccccagaccctgcctctgtcgatccaccctcagacccgtcggcagatcgtatttgtttgatgttttctgacgtgacttcactgaaaagctttgactctcttacaggctgtggagatattattgcagaccaagaggaagaggcaggtcccagctgtgacaagcatgtccccgggccaggcaagccggctctgtctaaaaagaaccccggcgtggtggcctaccaaggaggcggggaagagatggccagcccggacgaggtggacgacacctatctacaggagttctgggacatgctctcccagaccgaggagcagggacccgagccccaggagggcgcggctaaggtggcagctgcgctggaaaccaaggtggtgcccgagacccccaaagacaccaggtgtgtggaagcggccaaggacgcgtcctcggtcaagcgcaggaggctcaaccggattcccatcgagccccatcctaaggaggagcccaagcacccggagaaggagcagcaggaaggcgtccccaacagcgacgagggctactgggactccaccacgccaggcccagaggaagacagctcgagcagcgggaagaaggcgggcatcccccgggatagctacagcggggacgcgctctatgatctctatgctgacccggacggaagtccagcaacccttcctggagggaaggacaacgaggagacgtcctccctgtcccggttaaagcccgtatctccaggcaccatcacctgtccactgcgaacaccaggcagcttgctgaaggactctaagatccctattagcatcaagcacctgaccaaccttccatctagccatcccgtggtgcaccagcaaccctccaggagtgagatgcccagaacaaaaatcccggtttccaaagtgctggtccgcagagtcagcaaccggggcttggctgggaccaccatcagagcaacggcctgccacgacagtgccaaaaagttgtgaggtcttccaggccaaggtggatgggccccatgccaaggaatacaacttttccctggaaaccactaaagtaagttttgcttttcctaaagaaagtcttttaggacaccacccgtcccccgccctgctccagagcgtggaccgaggaggtctttgtgccctgagcagggaccggataacaccagaaagagggatgctacacgggggtttctcctctcaagataagtccctgagaattattttcaagcacttttttcttttttacctttaagtttttcttccttttgctttaatatactgaacacttggaagtcacctttacttgcctttgcagaaaacagaacttagccaaacctaagtaagagtcatgcctggatattgggataagccagtgtctagaggcctgaaggaaccgctgaagaaccagaggagatctcctcttccaagacacgtttccttccttcccttctttcctctttcctttccagttaaaaaaaaacaaaaacaaaaacaaaaccctttgctgtatcactgtgtggaaaatacctccaaagctgaaagagccaggtatttacctgatgagcagaggggaccactgattggcagaaaacttccctacgttcagttgttagatatgcaaattgataaggatctaacactaggaaaataaaggcgagttttggtttggttggtttcagtcatttgtttggggagatataaaaggctcaggagagcaggcttttgcttttgcttttgtttgtttcttcccccacccagtgcagaaatcaggatcagggaaagattttattaaatgccaatagatacagtatttaagcatttataaactgaaaccttttcatgtgaagataatgcatattttaccgtttatccagctgttaacattttgtaatcagtcaattcaatagaattattctggataattctatatctagaatataaaatctggtcttatagctagacatgatgatggtccccaaaccattgatgttctgttatgtactgtaatgggaagcgattctgattttgttttatatgggttctctggttctcaaaaaaaaaaaaaatctattgtgctggtgtcccagaggaatggctctgccttgttttgggtaagagtctgtttctcaccccaaaccctgttttcagatttttttttaccttgattgtaaaatttcagatccaaccattcctcaatataatgagtgcaaaatgaggaacacataaagaaaaacaatagaaagatacagtttttcacatcatttgccttttgctttatagacttatgacaaagacaagtgtgttcagaatatgacactggcaagcttatgtattgtaaacactttatgccaagttttttttgaaaagtggtttgcttctatgtatgttttctaatatttcagatgaaacatttatttcagaaagggttattatatgcctagtttgaatgataaactgaagcagttcctagaatgctattagtgtctaatgatgaaattaatatcctttttgaaatacacttcagtgtatttaatcaaaagaccagagcttctactaggaggtgattcatcataccaggaagattatgcatattcacgtgaaactgcacatatgtaaatgacatgaacacttctgtataagtctcatttccagagagattgcattagtaatgaactgttattacatgctttttaagtttgttttctgtttcataaatgaaagaacaaggcaagttaaatatatgaaaacctattttaataatatgaagaaagtaacaaaataaatggacatcaaaggaaagcaaattgagccagtagcagaaagtaggccattccccattttaaatttgcagtgattcaattaggagaggtttgctgaatttcttcattagtcatatgactggcttttattgcattgtctcagatccataatgttatttcaaagtaatcttttaatatttaatttctttatgtgtgtaaatgaggccctatatgcagtcatagccttaagcattctgaacacactaccaagaattcatataagcatctcacactcacgtgctcatgcactcaactgtgtacagactaacagacaaaagacatctactctagatctggaaattatttttgaaattatttctgtattaaacaagggatttacatttgatttcatgccgctggtactatttaggctcaaaatacattcatcttcccctagtgaatggagaaaatataaattttattcctagctgtaaaacaaaggatcttgatttccttgttgtacattttcctgcaagggttatattctcctttgcatgaatccatggcaaagttatgttggttcatttgttcaattgtacaggaaagttaagaatacctgaaaaacttatgagaatattgtaatagtaaaggcaatctatttcttaagcagtagaagaaaagtttttgctttcataattttaggacttaatcctccatttacaccattatgctgtgtctcctctttataagaaaaggaacacgtgagcaaagtttatcttaatttccactgacctgtcaattaaccagttataaaagatataaaatattttcttttaaaatttatattttccactttttttttaccttattttttaagaattgcacccacaccaatcaaataaaggatttgggcaatgaattaaacagcctcaatcacttgatgggaaatccctggagtggcaggaagagtagattctcaactttttccaaccatagaaaagggatcatagttgctttcttgtgccaagggctactttctctcatttgtgttcatggagattgttttttcaagaattttcctagatttacattccaatttttattaatacattatatctaatgaccttgtgaagattattcaggcccatatttgctgactttttaagggaaggattggatagaggctaattatatctttcccacatgtatgtatattctaagatacttggttgattgacttcctttagttgaaaggctgcccaaattagacaggaaaaagtcaaatcaattgttgggcgaaaatttatcggttggtttaatagctctgcacaaagacagcctgacttgaatgtctatattacacatacactgttatttgaaacactctgctttagtacagatggtggttgatgcgtttatcctgccattagcaccaattgggagaaattttactacagcattttaaataatcacaagagtaaatagatttctattattttatctaataacaacaatagaatatagaatacaaaggacttcctctagatacattttattttatctaataacaacaatggaatatagaatacaaaggacttcctttagatacattttccacaaattatctgcttatttaaatacaaagggtttaatatctatgaaggtaataactcaccgtgtttaaaggatttatttcttcatctcagaggtagtcttcaagtatttgcagttaaacagtatgcaaatagccctttgcttacacaattatccaggtaaaaagactatgtcaggtgttgagatttctttgaattttctaagagttttcattatttacgcctttgtcagattaattttaaaggcaactcttgactgttagcttggtgtgaagagatccactcaggcagctcatgtctcctaagtgccctcagacagcagtgacgggacacttcacatgacgctagcatgttggctctgtccgcatggcggaatgcattccctgctgttagttatctgaatttttctcctgaattacaaatatatggatttggctcccctgatgctgggcttctgctgagacctgttccagtacattcacgtatgctttgctccccttcattgttaagaaattaattcaagaagttttttgctgttaaacataaggaataagcatcacaattgcctcatctcatcactgaggaaagctggtttaaagtatctgagtgaaataagaggaaaaccccaaatacttcacctaacccagtttccctttcccctcctccaggcagagcaaggaaaagaacagttgtaatttgtgtaaactcagccttagaaaatttcaattcattacacacaaaaatatttatgaagcagtttggaaccaaaggggtagtatggtagacgagtgtcttacagagcctgtgtggggaagcaaaaggcaagggtgtagttcacaggcagaagcgagctgtgacattgtcagtgcagcgtgtaagtgtggctcctcacaggcggccattgattgtgagacctcatcttgctctgaagatttcccggtggctgtcatgcattgcttctcaaaagccttgcactgtgataaggtttaaggagacagattgttgcaacaatagccacttctaaggaatgttattatgtcactgcagatgatgtttttaagaggtgattcagaatgatagtttcgtgattacggaaaggagttccttctcaaactgcaaaaggaaagatgaaaatagtcatgaagcctccagaactgaaattgggcaccttttatgatggatatttactttaattcaatgcaacacatatttatggggcatagactgtatcaaatacttaataaaacccattcagtttggagctcacacctaagctgcgctgtaattggattttcttaatattcattaaaaacacaaaacaatattattttacttttttttggtatttgcatttgttgcttatagtttgtggggtgaagcaaagtggtgtgaagttgaagaagggcactatgaattaagccacacaaatgcctctaaaaaatagtaaatgtaacaatggttaacattcattgaatacttactatgtgtcaggcactgctaggagatttagaaataattacttagtcctcttaacagccatgtggggtaggtaatattatctccccagtaagacagctttaattcatcctttttgtttctatccctttccatctctgtctgtctgtctctctctctcttttcccctagtctctaggacagggatataaactctttagtgattttcagtaatagagagctaagcactgcttagtgtcattgtcagctcacttctaatagaaagagctaacccatgtccacgcagctgaaaattagttttgtgtctgagatgatggtgctcacaatcatatacagggaaccctgccactgtgctatgctgagtaggcaaacattggccttcccttggagggatcctcttctcttaggattaatgtgggaagtacagacagaaatctcttctgttgtcatggcgatacttcttccctgacagggtatcattcattcaaagcatatttgtttcatttgtttttattcctaccttaagccatcttggtgggttctgggtggtctatgcatatgtgtgtgtgttttaattgcagtaagaatattgaatatgagatctaccctctttaattttttttttttttttttttgagatggagtcttactctgtcacccaggctggagtgcagtggcttgatctcggctcactataacctccacctcccaggttcaagtgattctcctgcctcagcctcccaagtagctgagactacaggcgtgcaccaccatgcccgttagtttttgtatttttagtagagacagggtttcaccatgttggccaggctggtctcaaactcctgacctcaaatgatctgcccacctctacctccaaagtgttgggattacaggcaatgagccaccacgcccgggttaccttctttaatttttaagtacacaatacagtattgttaactatagccacagtgttgtacagcaaatctctctcacctatgcatcctgcgtaactgaaactctgtgcccattgaacagcagctcctcatttcctcccccatcagcccctggcagccatcattctactctctgcttctgtgagtctggctattttagatcccttatagaagtggaaacgcgcagtatttgtccttctgtgactggcttatttcattgagcataacgacccccaagtttagccatgttgttgcttatggcaggatttccttcttttttcaggctgaataatatttccttatatgtatatgctgcatttttaaaaaccctttcatctactgacagacgtttagattatttccacatcttggctattatgagtaatgctacaacgaacgagggagtgaaaatatctctttaagatcctgatttcagtttttttgaataaatacccagaagtggaatgactgggtcattcatatggtaattctaattaaacatagaattatttttaattttttgagaaacttctgtgctgctttccacagtggttgcatctgtttacatacttaccaatggtgcacaagggttccaatttctccacatctttgccaacttgttatctgtgtttgtttaaatgacagctgtatgagttgtcccttgcctccatgcaattctgaacttcagaaataagcacttggctcctttaatagctgtccgtcctatgttgtgtctacagccactgaatcctgtcctacattttctgattcattaactcattcaactaatagctattgaacaccatcaataagtcagccaccatgaagatgagtattttatattgaattctactaacatatcctgtatgtttactatgttgccagagaggatgctgtgtgctttttttacattgttatctttactcttcacaagaaccatgtaaggtaggtattggtaaaatgggtaattttggaaatgcttcaataatcgagtagaataacttttgctctatgtgagaagatacgttttaaataagatatggcttaggtttctggttacctgagacatactataccttctcagatactctcagacctgaatcatttaacaaactaaggcagaaatactaaaaatatctggttcaataacataggggcatggagtagacatgcagaaaatgcttgttcacttgccttgaaatggctccaggtggcctgaaggaatcaatgaaacttctcaagtatctacattacaaccactggtccccactacacatttatttctaaataaaggaggagaaactctagcaaagtaatatttaacattttcattgcttccaggataaatcttattgaatatggaggatctgatagtggtaggtctatcaggaatatcagggaaaatgcttttgatgttgttggcaaagtcaattcctatcatttgtacttgacaccagctacctagcaggctcattgtgaacttcaggtttcgcccacgttatttatataaagtatctcagtgtaatatagggagttgctggttatttgaaaatagtaacaaaaataacccaaacgagaaactccatttccataattagctttcctgaaagtcaggcatgtctttgaggacaggttttggcagtattatttttgtgcacaggaggaaaattgttagtaggtttatagatgttatttttataatagaatgttaaacccctgaaaaacatcaaaaattgtctcctagaactaattctatgttttaaaaacttgttttaaaaaggattctaaatagcaatagggtctttcctcctttctccactccaatggtttaatgggatagaggaatcaatgtttatatttttaaacctgtaaatattttattttgggtattttgtatatttgttgatataattccattttgtgcatatgtaccattgtgcatgttgctgtttttgatagtcactcttttaatgaatgtaagaagcttgggctaatagcacttttcttgttccattcaaacatctgaaaatgaaattacaacactgccattttactgttgtgtttaattcagtcaataaattttgttgctcctttgcatttaaagtgaaaaaaaaaaaaaaaa

SEQ ID NO: 76 - DNA, 368 bp, Artificial Sequence
  FAM83C-AS1
aagtgcggccagaccgaggctggagaaagagcgcagccagagacggaaaggcagccaggctgcaggatagtgatgggggccaagggccctgctgcacacttggacaggatgaacttggcccacattttgtagaatctgcaaaagccccgggttctctcaaaatgtcacagtggtaacttggagcccctggactcccccaattcctccttcggcattcaccctcctccaggggtttccccataattggcctgaatggtgcccttcccattcccccaacgtgtccctcccataactcctcaaagttcaggatacaccaggcgctgtgattcacaataaagtctgcctttattgatgtgtatcatgtttac

SEQ ID NO: 77 - DNA, 2609 bp, Artificial Sequence
  LINC01215
gtgccaccaccagtctccaccactattctgaggcagaatgcacctattggctcacaatgctgtgaaagaaaacaagaaagtcgtgatgataacaatgcagtgtcttcattcataatggattgcagttccccactcaggaagaggacattttttttaaaactacatgatacaactgagagcttggaagctatccatgcataagttttaaaacccagcagcttcatggtttcctccttctgttggcctggccagtggacacagtggtcacgttcctggcatggagatgtcattcatggtctctcagacccaagtgttaccagtgaagggtgtccaggttcttggcgctttgaacaaagaattggacaaaactcacaaacaaagcaagaaaagaaagaagcaacaaaagcagagatgtattgaaaatgaaaacacactccacagggtgggagcaggccgagcaagcagctcaagggcccagttacagaactttctggggtttaaataccctttagaagtttccattggttacttggtgtacaccctatgtatatgaagtagtggcctgtgatcagtctgattggttggaagggaccaatcagaatgcaaacgtctgattagttgtggaaagtgaccaattagaggctgaagtgaagttacaaagtaatactcccacgcaaatgaagacttggcccacaaccaacctgattggttgtgagaggggaccaatcagagggactttcagtttttcacctgcaatgcagaaaaagggtggcaggtgaggggtgttgcaaagggagtagcctctggtccttttgttacttgggcacttgggcgtggaaagtgggggttttccttttgatttagttctaggaagtcagcgtgaattggccttacattccctgcctccagaccctattctcctgcctcacaagtgctcctaggagctgtacatgcctgtctttgtccccatgtagtcagctcgttacaggtgggtcctgctgggtctttcgttcttgcttctctgcttcaagatggctaataagtcctggtccagtgagtccccagtgcagacatagagcagaagggaagtgggtccagttgcatttcctgcagtttaataaagaaccctgtgctctctggcccattacctaaagctgatattgtgcttggaacgtgtagtgttatccaatccagctttaccactgctaaagctgataccacgctttgatcctctgcttgctcattttgccaagttcttaactgcgtggaactggaaggtgagggctggatgattgatttttcaccctgcccccaaactccaacaaccgaaaccaagggttcttgaagagagaggggcagggcagcaacagggagactgaaacttggggtggggggggggcggggggaggggggcggacggaatgtttttgaagtgtgtgtttgcctaaggtgtgtgtagaaaggtagctacttttcagtctctgcctgcctttaatccattacaatgtcctaattaaaaacatttaaaaagctacattggaaaatgatccctgaggctagaatgctgttggcacagtgaaaaagacgcaatcaataagtaaacaggcaatgtcagcccggagagctttcagaacaacatgcctactcgggggaaaaaaaattacaagtcgctttagcctatttaaatattttccaagatctttgttaaatttcaggtaataatatttcttcctttgaacaagcgttgtatgtttgcctttgactgagaatggcctaggctagagaccatttggtattcaacttgtgactattttagtatggggctggaccccaaaaattcatgctcaatgaaatgattttcacttactgagatgaatttactttttgcttccttcagcaattcatcaatctaatggaagaaagagtagctatcatcataatgagaatagacttctacgagtatgagtcaatgtcaatactttatttaataatgcaaattctattactatatatttggtctcaatccaaatttgctttaaattgagtttccttgccattgcacactcctatctttctgaacacacaccaccccacacacacaccatacacacttgtttcattgcgcttcattttattgcacttctcgaagaatgtgttttttacaaattgaagatttgtggcaacttttcatcgagtgagtctattggcatcatttttgcaagagcatatgctcacttcctgcctctgtgacagcattttttagcaataacatatttttaatgaaggtatgtacattgttttttagacataatgctattgcacacttgactaaaatgtagcctaagtataatttttatatgccatgggaaactaaaaaaagtgacttactttattgtaatatttgctttattactttggtctggaactgcctcacactatctctgaagtatgcatgtatagcttttcataacacagatatcacatttgaccagatcctattgttactgaacaatgttgatgctaacattgatgatatcaatcactattactggaatcattatcaacatatcaataaatatttttagaacatttaaaaaaaaaaaaaaaaa

SEQ ID NO: 78 - DNA, 1069 bp, Artificial Sequence
  ANKRD44-IT1
gtttgggaaagagaatattggaattcatatttctttaaatcattcttttaaacttttaatttttatgtagttttagtacatcttatttgctagtactgtgtcatctttttggctgtatttttcactggctgccacctggccaaatcaccacttgggttataacagcagcctctgactggtctccttccgtctgaccttggcccctgcactctactctcaacgtagctctcagagtgatggaactcagaacttgtcactcctgctcaaaaacttccagtttcacccaggggaagtatcaaggtgacatgaggggacaggaaatattgtccctaaatgttctaagagtggatctcccatgtattcaagcaatcgaggggtgtttaatgagctccatctacatagcaatgatacagcatagctctgctggggctctctgctctccccttctccacaaaagggaaggacaggtaagaacaggcacaataaaatagaaaccagacagaaagaattgggaacaaggagacaagacaagaatcatgctttacgtgatttaatcctaatatttttatgagaggatggctatcatcatttcattttaaagatgaggaaaatgaagccgggtgcggtggctcatgcctgtaatcccagcactttggaaggccgaggaagatggctcacctgaggtcaggagttcgagaccagcctggccagagagatggccagagatggctagagatggttgctgcaaatgccattatttcattcctttttatggctgagtagtattccatgagggaaggaattaggagcgggaaggagattgactgttagtttcttaggattggactaacaaaagtggaggttgttacttacactgcaaaagaaacaaccagagctgtgtcactcagaaggctgaaaagaatcaggctgacagcataatgcagtgaagatgggtgaagagagatgtgtttcatctgaaatttgaagggctttacaactcttctcctttaactaacttaccatcctttaactaacttaccacccaaaatgaattctgtagcctttgtca

SEQ ID NO: 79 - DNA, 4234 bp, Artificial Sequence
  MIR133A1HG
actgaggaagaatataagttagcctcgtagtgaccatgtggaagtcctgacctcgcttgcagacttgacctctggatgtgacaaggtgaggttctgtgttcactgatacatccccttccttcaccgggctcatgaaaagaaatgctgaatcagcaaatagagtgaacgaacaatcaagatgagatggctgctgttgatgtgattctctaggttactacctttcttcctgctgcaaatgctgcatgacactaagcttacaggatctagaagcagactacaaaaaaagaagaaattcactctgaagactgaagaaacactaggctgatcttaagtttccgaaatacactctgtaacactacactgattctttgaatctcttgcaaaaagaatcaaaccaggacaaagttcaacagataactggtcaaatgcttaggaatgtctatgtccaccaagaatatggaaccattaatgccatgcttcaggtaaacttgttacaaaatttagtcttcgataaattagtctctgcaaatgatttaccattgctctacattagtaagctgaatgtttcactaacaaataagaaaataaaatatttcatgtttttacagctaacaacttagtaatacctactcagagtacatacttctttatgtacccatatgaacatacaatgctatggaatgtaaagaagtatgtatttttggtaggcaataaaccaccaagggagaattaaactgagctaaaagaagctcttgcttctttctacgtgaatgaccgtcatatggtaaattaacctagtcatgaacagatgacctttggcaatactaacaccaaaaaaaaaaggttatctactactgatagatagaaactatccctaaggtttttatttcatgaaggaaaagaagatccagtgaagtagatttcaattatcatgaaactccttttaaatcatctaagtttaaaacagacatcttacatttttaaattaggcactctcattattaaaatttgactgcaaaagggaaaatagtattactagcacaaaagaatgaggaatacacatgacctattttctgtctccacaatttaatcttaagtatatctcattagtagggctcactgatttgtacagaaaaataagatactaagagctggcttcattcacataataagctatttcttctcattttgataaatgtataattaatattagaggaatttctgaccaaaagttttgttgttttaaaaaggctttcttttttgacagctacaaacatagtggcccttgtccttccttctcaagtttatcagggtcttaacccaaatctctactttaaatgtgaagttaaaacttaaaattaattaaaatgtaagatttaagcatgaaaaatgacaaaattctggtccacagctgtaagtcagcagggtatattggtaacagactaccaaatatttaaaagaaattaatttatctgtattatcttcgaatttgctttctccaaagagggcatgtaaaatgaaagcactatagtcaagaaccaatttatacagatcgaagaactgtttttattgtactatgcaattacaattcaatttctctaaacttgatcaatccattgtttagaaatatcaaaatacttttatttcacacagtttgtatattatttataaaaaattccaaataatgctcttagcaaaatttataagcagtacctgttttaagctactaatgacaaagttagaaaataagagtaatattcacatattctaaccatttcttactaaaagtattatttcaactgaaatatttacacatgtataaaagcataatattttaaattttttgtatcagaaattgaatggaaatgactaagtttaactatagttcattttctgtttaataagactagttaatacaaagatgattttcattttatcagattataaagaatgagaatgacttacacatggcatcatatgtgttactgcatgtttactggaaattataaaaggcacataattttaaaattctacactttcaaagaaattagttcaaagcttaactcacataagcatagcccttctgatcatccacaaaacagaatggcaatgattcatgttctatttggtaagtttacctgtataggtcctaaataccaagaactcaaaatatatacctcaaaagtagaggttcttctataaaaatactcaaagcttattactctacttgtgttttataataaacagttatattggtcattctataggtatacaagttgtttaataatccttctcaaacatcctagcaactaagactctctttgctataatattaagactatataaataatccttagaaaataaaatgacaggctattcatttttaaaagtaaaattatatgctgattctggtgcttgcgagtttaacttatctaagagtattttcaatcactctaaaatgtcacatctatcacttagatcagctgttcatttttaactgagtacatattaaactctgggcatctgctgacactggtataactcaaacatttcaactgtctccctgacagggataacagatgctgacattatcaaatgctgtactatttttttcccatggcctctccttgccccgatatggccagtatatgaaactgaactgccatccaaaaacacacttgagcaactggatctgctaaacagctcccatataactagtaaaaatagaagccagtattattgctatcttcagcacttaagtttaggcagtttaacacctgtttcacttctactagaaaaaatgatgaaaaagaattgtagttaatttcaccagcagtatgatacttaccaaccaacagacgcagaatatacttagtgtaagagtcatttgcatactgcctgaattagcgttgacctctcagtttaaaatagtaactgtaaagaatatttctctactctatatttctctgagagcacttaactttataggcaaattataatttatcaaacttttattttatgcaagaagacacccctctcaagacattgaaatcaacagtaaaaccacattataacaaaaatttactctgatttttcaagtattatccacacaatagattttaatacttgtatccatggattgtaactaaccaccatgtattactaaggcgataatgagaagtaacttggcaatctgtacccaaaatgacaaagaacttagtcaaggaaatagacctttaaaagggttaaattactaagctatgattagtaacaccacgtaagcaaaaacaaagaaaaactggcatgcatggtagttcctttcgacacaagtccaagcaatacactgaatacacatgtgatctatttataaatcaaagggcagaggtactttcttaaggccactgatattcctacacccatcaacaatttgctattagccctcaactataatgctaaaagaagcagtggcagtagaagggggtgactaactgaactcttccccaaccttttagcttaactatttatctggtttgctgcctagagataaatggaaaacattactctaaaatacatcaaggtctatttgttcctttaaatactattggttttgaaatagcttattgtctacatgtaagaattaagcaaagacttcggctgtggacaagattagaaaaagaaaaagaagcaaagatgttgaaaacaaagacgtacattgatcattccttaatgcagtaatgtgttaaaaggaaaagatttttaaaccattaagcgcaggaaaacagtaggaaagtgacttcaaaatggaaaatttgacattcagtgactgaagcattggtatgataatttctaacacttgtagaaggtccatgactgtaattttaccaatgaaaagcatttaactgttttggattccaaactagcagcactacaatgctttgctagagctggtaaaatggaaccaaatcgcctcttcaatggatttggtccccttcaaccagctgtagctatgcattgattactacgggacaaccaacgttttcatttgtgaatatcaattacttgccaactaatttcaacttatttacattatgcagactgtgattataatcaaataacttgttactgttaattctacctggaaaagctagaatggttaaagatgtttataaaaagctttatgaaaaatgtatggatgacttaaggatttcaaataaaaattttacttattatggtc

SEQ ID NO: 80 - DNA, 1194 bp, Artificial Sequence
  LINC01770
accgcggggccgtgcggacggccagcactcgactttgcctaaaaaaggaagcagcaggctgaggctgaggagctggcggcaggaacaagggagagctgtgtccccgccggcgccccccaccccccctgccggggatcttggcagtggaggtgctggctgcgctccacagacctcagacctcggctgggaccagaaatgcctggtgcttccgcctgggcccggtggggggactttgggtccccagagtgcaagctgtaccacttcgaggggcctcgccaggccccccagcccccagtacacaggggctgccgtggagatgacgctgaaggccgcagccgctggaggacctggggtctgaccggaagctggctgcagaccctgcggaggcacgtccaggcctctgctctccggggctacggcctcccacaggcacgttcctacatccctctgtgaaccgcccacaggcccccccacaggtgttcctctgtgagctggtcgggcggccggggccggggccgggcttcgctgctccgtgccttccacctccctggcggtgcggggcctcagggtgggcctgggaagctggaaacacctttggaaacagccgcctgaggcagctgtggacagaagaccctgcccagcagccaagggagctggcctctccgctcagcctccccacccccaccaggcccagctgttgttttcacggctccgggaccaggcggatcctcagccaagagcttcccaggagagccctcatcttcaacccctagtggcgaccagagccagcccgggcaggaggggaaggaaggcggccgcggccccggggaagccatcctggcagcttggccactggcccggctcctgtctgaccaggaaaggcatcaaagccggactcggatggaggctggaaaaccccgagacttctgctggactcgacccagccacacaccaggctgtgctcaaggccacggaatgagccttgaccctggccccagacggagcccagaccttgctggtcacaggctgagccctgctggcaatatgatgtactagatcccttaaaaggccttccagcaacaaccaacttctggatgaattactatgagcgtacatttttaatagactgttgtgtttccaagaaagtaaatatctccgagtctcccccaaaattaaacagcaaaaataaataag

SEQ ID NO: 81 - DNA, 767 bp, Artificial Sequence
  AGR3
agaaacatccagaatacatttccaacaagagcactggccaagtcagcttcttctgagagagtctctagaagacatgatgctacactcagctttgggtctctgcctcttactcgtcacagtttcttccaaccttgccattgcaataaaaaaggaaaagaggcctcctcagacactctcaagaggatggggagatgacatcacttgggtacaaacttatgaagaaggtctcttttatgctcaaaaaagtaagaagccattaatggttattcatcacctggaggattgtcaatactctcaagcactaaagaaagtatttgcccaaaatgaagaaatacaagaaatggctcagaataagttcatcatgctaaaccttatgcatgaaaccactgataagaatttatcacctgatgggcaatatgtgcctagaatcatgtttgtagacccttctttaacagttagagctgacatagctggaagatactctaacagattgtacacatatgagcctcgggatttacccctattgatagaaaacatgaagaaagcattaagacttattcagtcagagctataagagatgatggaaaaaagccttcacttcaaagaagtcaaatttcatgaagaaaacctctggcacattgacaaatactaaatgtgcaagtatatagattttgtaatattactatttagtttttttaatgtgtttgcaatagtcttattaaaataaatgttttttaaatctgagactgaaaaaaaaaaaaaaaaaa

SEQ ID NO: 82 - DNA, 4386 bp, Artificial Sequence
  DIRAS2
atttaagcaggagcagcagcctctgcagcagttggcacatctgagaaggcagagattgaagagagtaggaggagcgtgcagcggcggtgacagtgccaggccggagcggctcaggccagcgcaggtgcaggggctgcgagcgggtggagcgcgagggcgctgggcgcagggagcacggccggtgggcggtgcagggcgcacggcgggcgagcagctgacagcatcgtcacggcggcgggagggagtgcgctgcgcctgcctccgggaggagccgcatccacacaccctgcgctgccctgtcctgcgcgagtggagctctgaagaagctctgagcggagttgtgttcttccccaggtgcgtcctggctgagagttggagctctccagcaacatgcctgagcagagtaacgattaccgggtggccgtgtttggggctggcggtgttggcaagagctccctggtgttgaggtttgtgaaaggcacattccgggagagctacatcccgacggtggaagacacctaccggcaagtgatcagctgtgacaagagcatatgcacattgcagatcaccgacacgacggggagccaccagttcccggccatgcagcggctgtccatctccaaagggcacgccttcatcctggtgtactccattaccagccgacagtccttggaggagctcaagcccatctacgaacaaatctgcgagatcaaaggggacgtggagagcatccccatcatgctggtggggaacaagtgtgatgagagccccagccgcgaggtgcagagcagcgaggcggaggccttggcccgcacatggaagtgtgccttcatggagacctcagccaagctcaaccataacgtgaaggagcttttccaggagctgctcaacctggagaagcgcaggaccgtgagtctccagatcgacgggaaaaagagcaagcagcagaaaaggaaagagaagctcaaaggcaagtgcgtgatcatgtgaaggcccttcctgcgggaggagcagctgtgtgtccccggcacctcactcccccaaaatgacacccaccgtcgtcagggtagcatgtataatgcccacgtgttaaacattgcatttaatcgagatgcgtcctattgtccttaagagggcgtttcacaccaccaacagtaagccacccactctggagtcacagaatctgccaggcggttcaagtgaaaaccaacacactcagcatccctgggaactgagaggtgccagcaattgctgaaggtggcgatgaacacccgaaggtgggagggaggactggtacccacaaagcaacatgtaccgagaggactaaatgtcatctacgtgcatgtgagagcgtgttaacctagagttacctgcaccaaccccagacagaagccaatcacatctttgggggaggggaggggcaggaagaggtgagaagatcagatggtccaaagtggaccacacttggtccattttacacttttttaaaggggattaaaaaacacagcctctcccccaaagggtgtccgttcttaattcccacctggcctgttaggagccttgctaccctgaggggatgtgttcaccttacctagacctagttaggaagtatcattttaagctattagagtatttatcttcatgtgcagggataagtgcactaacagtgtgctgctctgtcggaagttcttcagtttttaagtgaggatatcgtgacagtattaaaacatcgcaataatgttcctgtgtgttatacatcgagggttttagaaatgtgattttcttcttttgacctgtgaggagtataacttctttcagccctcagattttaaatacaagcaaataaactcactatttttagacgtttttttcctccaaggtggttttcttctcttaaataactcgatctgtacccagctgggtagcagccagcaaaggccatcagacaaccagaagcacatccatttttgtagtgtcacaaacatgtatatgccacactttgcaccttaatgaaatactttgaaacagaagttattcactgtgtttttgatgatctatctgtattggaaatatgttcctggaaaatgcatttaaataatagtaaattctcttgcatgttccattatacgtgtcttctaagagctgttcaatacagtattcactctagaaacaattatctttttctcttaatgattttgtgtgcatctttaatctttcaagccaaattacagctatttcaggtttcctgtgttagcttggggataggatggtggctggagacaggcaggcttctctgccctgggaagagcccactcagcttaattgctctgccatcgtagagcctggttggacttggcttcctgaaaactcccactgatagtgcctgttagatctcctgtttgtttcagttggcagaacatttactggccccaactgtggcatcatcctctcagcagtcttcctgtcacccgcctggcaggcagaaggagctgcagtcccacgtgggcctgcctgggggggtgggggctgcatggctgttgggtggcagtgtcagcacagggagggcttaagttggggatgtttgaccaggccacctcctgcaactgctgtttctcctgtccctcctatgcagggcttgcagcagcagcagtgtggccatctccatcccccaaagcacacttgctctctcaatatgtcctagttttcttcagccttttctggttcagttcccttgtcctgatctcatcctctctggtctcccaataactcacccttgggatgtgtttagagcgtgggaggtgcctttgagaactgcttgactccatgatctcctagaacaaaaccgccctgactttacagggggaacactcatgctgagctgagaaagcagagaagtggcgtgggagccagctgggggtgaagagcatttgggccagtcccgtggcccccttcagattcctcaagcaggattgttctgttctaaaaagctgttgcacagcattcgcaatgagatctttagttggcggattttctggaacatttgtttttcaacttgtcccgacattttttttctgtttctattctgagagagagatgatcaagttttaatttgggtataggttaaatggaagaagaaacagaacttcatggccaaagtagacctatagattttgattgggttctttgttaacagtagaatgcgatctttgccactgactgtagtattaataaggttttaatgtgagatattcctgcaaaccatcccatttctactgattgtaagtcagaatttcttttatccctttcaaatcagtttctacatgtttaagtgttcagggcttcatcagcatgagaagtttgtaattactgaaagtctgatttcattcaggacacattttttccttcatattttttctgtgaatttataggctaggaaggctattgaagcctcaattatgggtcttcattttgagatcgttttctatgagctgaactgaggatatcaatggttatctcaaaatcgtcttttaggagatccccaattgactcagagtttgaggagttagtatcacagaattagatttttttaaagcatttgtacgtttccattcccaaatatgtagctgtggttcttgaaaacacatcctacattgcatatgggcatagcagtttttgacccaggcagaataagttaatatttaattaaatattgctttgaagatggcgctctgggcatgagcatggggctccatgacttcccttctatccccatgagcccctcctccatccagcgacaagccatgggcatgcatacaatgcagcaagaccaacacaagagcaatattgaattgttcattctatctaaaattacatgtatataaaatatataatttatcttcctgcatttttgaagtataaagtcataaattgtacatatctgtaagctagtatatttgtttcactgtttgtaatatttaagaaatgctcattctttgtagaacaaaaatgtattaaatattttaaaaattgctctgtgatacttaatttttttccccaaaatttgtaatgtgttgcttctacataagttctctggaaatatctacaactaataggacacatgtaaatccttgaagacacatcctggaattcataccccacaaggacagtgtgtatacaaagtatttgcagagcatgacttttatatgtgtgggatatcaatgtgtatatttatatttaaagtgtatttattgttacaagtctattctctattatattttatttactctgcggttataaaaatcacccttgcatacaagtttctagttgccagtgatgttctggaaataatgggagatattacaataaagctacagttatgacaccctg

SEQ ID NO: 83 - DNA, 4621 bp, Artificial Sequence
  PCDH10
gctcagaaactgccagcccagaccacaggctcagaggctgaagcaggaggaaggaaggactggaaggaaaaagagacaggttagagggaaagaggcttgggaagaaaacagcagaaaagaaactgctcattacacttacagagaggcaagtaacggtggagatgaggacagagggaaccaagactctgaaagacaaaaaatacaaatagagcgaaagaggaaaaaaatgtcaagaagaacatccatccggagaaatgaagagaatgaaagttttaagctgcagagccgttctgtgcttttccggcacaaaattatatcgctgattttaagcccttttgcatttgccagccgttgacattaagaggcatgtttaacggtgccaacagcatctccttttccttctcctcttcctcttcttcttcttcctcctcctcctcctctttttcctcctcctcgttctcctcccatcagcaagaagacaaaccgaggacagtcttgaaatatcgaaatttcctctttgggatttgccagcgccaagactgtcggaataaaggacgctgactattgtattattgttattttattaattagtcagtggaaagattacagatgaggaaaggggacgcctgtcacccttcctgtgctaagatttaaaaaaaaatgaggctggattgcgggaagctctaaaatgaagcaaaaggagtaagatttttaaagacagaaagccacaggagcccccacgtagcgcacttttatttgtattttttcagatttttttttgtttcgtggtggtgggggaggtgattgggtggctgactggctgcgggaagctacttcctttccttttggagatgattgtgctattattgtttgccttgctctggatggtggaaggagtcttttcccagcttcactacacggtacaggaggagcaggaacatggcactttcgtggggaatatcgctgaagatctgggtctggacattacaaaactttcggctcgcgggtttcagacggtgcccaactcaaggaccccttacttagacctcaacctggagacaggggtgctgtacgtgaacgagaaaatagaccgcgaacaaatctgcaaacagagcccctcctgtgtcctgcacctggaggtctttctggagaaccccctggagctgttccaggtggagatcgaggtgctggacattaatgacaaccccccctctttcccggagccagacctgacggtggaaatctctgagagcgccacgccaggcactcgcttccccttggagagcgcattcgacccagacgtgggcaccaactccttgcgcgactacgagatcacccccaacagctacttctccctggacgtgcagacccagggggatggcaaccgattcgctgagctggtgctggagaagccactggaccgagagcagcaagcggtgcaccgctacgtgctgaccgcggtggacggaggaggtgggggaggagtaggagaaggagggggaggtggcgggggagcaggcctgcccccccagcagcagcgcaccggcacggccctactcaccatccgagtgctggactccaatgacaatgtgcccgctttcgaccaacccgtctacactgtgtccctaccagagaactctcccccaggcactctcgtgatccagctcaacgccaccgacccggacgagggccagaacggtgaggtcgtgtactccttcagcagccacatttcgccccgggcgcgggagcttttcggactctcgccgcgcactggcagactggaggtaagcggcgagttggactatgaagagagcccagtgtaccaagtgtacgtgcaagccaaggacctgggccccaacgccgtgcctgcgcactgcaaggtgctagtgcgagtactggatgctaatgacaacgcgccagagatcagcttcagcaccgtgaaggaagcggtgagtgagggcgcggcgcccggcactgtggtggcccttttcagcgtgactgaccgcgactcagaggagaatgggcaggtgcagtgcgagctactgggagacgtgcctttccgcctcaagtcttcctttaagaattactacaccatcgttaccgaagcccccctggaccgagaggcgggggactcctacaccctgactgtagtggctcgggaccggggcgagcctgcgctctccaccagtaagtcgatccaggtacaagtgtcggatgtgaacgacaacgcgccgcgtttcagccagccggtctacgacgtgtatgtgactgaaaacaacgtgcctggcgcctacatctacgcggtgagcgccaccgaccgggatgagggcgccaacgcccagcttgcctactctatcctcgagtgccagatccagggcatgagcgtcttcacctacgtttctatcaactctgagaacggctacttgtacgccctgcgctccttcgactatgagcagctgaaggacttcagttttcaggtggaagcccgggacgctggcagcccccaggcgctggctggtaacgccactgtcaacatcctcatagtggatcaaaatgacaacgcccctgccatcgtggcgcctctaccagggcgcaacgggactccagcgcgtgaggtgctgccccgctcggcggagccgggttacctgctcacccgcgtggccgccgtggacgcggacgacggcgagaacgcccggctcacttacagcatcgtgcgtggcaacgaaatgaacctctttcgcatggactggcgcaccggggagctgcgcacagcacgccgagtcccggccaagcgcgacccccagcggccttatgagctggtgatcgaggtgcgcgaccatgggcagccgcccctttcctccaccgccaccctggtggttcagctggtggatggcgccgtggagccccagggcgggggcgggagcggaggcggagggtcaggagagcaccagcgccccagtcgctctggcggcggggaaacctcgctagacctcaccctcatcctcatcatcgcgttgggctcggtgtccttcatcttcctgctggccatgatcgtgctggccgtgcgttgccaaaaagagaagaagctcaacatctatacttgtctggccagcgattgctgcctctgctgctgctgctgcggtggcggaggttcgacctgctgtggccgccaagcccgggcgcgcaagaagaaactcagcaagtcagacatcatgctggtgcagagctccaatgtacccagtaacccggcccaggtgccgatagaggagtccgggggctttggctcccaccaccacaaccagaattactgctatcaggtatgcctgacccctgagtccgccaagaccgacctgatgtttcttaagccctgcagcccttcgcggagtacggacactgagcacaacccctgcggggccatcgtcaccggttacaccgaccagcagcctgatatcatctccaacggaagcattttgtccaacgaggtaaggctgaagcgaaaggaccaccatctctcatctcctccatcagaaagcctcctctagcccggcccttgtatctctggtgcactgtatctatttttaggatattagcttatgtgtatcgttgtgggagcagagatgggcggtcaccttctcccactccttcgtgtgtaacctaactttcgcgttgttccaccctttcacatttattttcattccgtccccttggtactttgccaccttggagctccctcctttgctcttccatcctgtcagtcctttcccttctcagtaacctgggcatgaagggaaactgcgtgaagggagagggaaatgtggaggagggacttactttctagcactggcaaaggtcttttttctttgcgtctgtcccaggcattaataaagttggctctattttgctttgtttaacgatgcttttagtcgcgtgtacaagtaagctatagattgtttaactttacacagttgtctaacctcgaattcatgttttagtgaacaagttaccagatccttctcctctgaactcgggttgcaaaaaaagccttcagttcggctctggacagcatttacagacgctcttgaagccgagcgcccacacagtgtgaatttgaatgaagctgcgttggcacaaacccctgttaagagtaaactaacgaaaggcttaaacaattgttgtcttaaatatatctttttagctaataatcaccttcttgccactgttttggataaatcacgctgttggctttcttcataaaagaatttggcttgtcaattctgacttctttttaaaaggatggagaagtgacaaagtcggagggtgggggttggggggagaacaaagttggtttatgtgaaagaaagcttggaccggaaaggtgtgtgggtggtagaggtggggaggcgaatgcagagggcctttggaggggaaaagaatgggggtggtggggggcgggcaggattatgaactcctttcctggcaggttattttatttgagtcttagatattattaattgactttcatgaatatttgtacagctcatttgtatcttaagcacattttgaaaataaacaacaacataattccaaaaaaaaaaaaaaaaaaaaaaaaaaaaaaaaaaaa

SEQ ID NO: 84 - DNA, 2963 bp, Artificial Sequence
  NEK5
agcggccccgggaacccggatccttccgggacgcttcgttggccccgcggagccggcggagcagttatctgtggccacaaagaaagttatttgtctctgtcttggcaaggctgggaggaaagttttagctaagaaactcagcccattggagaccatggataagtacgatgtgattaaggccatcgggcaaggtgccttcgggaaagcatacttagctaaagggaaatcagatagcaagcactgtgtcataaaagagatcaattttgaaaagatgcccatacaagaaaaagaagcttcaaagaaagaagtgattcttctggaaaagatgaaacatcccaacattgtagccttcttcaattcatttcaagagaatggcaggctgtttattgtaatggaatattgtgatggaggggatctcatgaaaaggatcaatagacaacggggtgtgttatttagtgaagatcagatcctcggttggtttgtacagatttctctaggactaaaacatattcatgacaggaagatattacacagggacataaaagctcagaacatttttcttagcaagaacggaatggtggcaaagcttggggactttggtatagcaagagtcctgaataattccatggaacttgctcgaacttgtattggaacaccttactacctgtccccagagatctgtcagaataaaccctacaacaataaaacggatatttggtctcttggctgtgtcttatatgagctctgcacacttaaacatccttttgagggtaacaacttacagcagctggttctgaagatttgtcaagcacattttgccccaatatctccggggttttctcgtgagctccattccttgatatctcagctctttcaagtatctcctcgagaccgaccatccataaattccattttgaaaaggccctttttagagaatcttattcccaaatatttgactcctgaggtcattcaggaagaattcagtcacatgcttatatgcagagcaggagcgccagcttctcgacatgctgggaaggtggtccagaagtgtaaaatacaaaaagtgagattccagggaaagtgcccaccaagatcaaggatatctgtgccaattaaaaggaatgctatattgcatagaaatgaatggagaccaccagctggagcccagaaggccagatctataaaaatgatagaaagacccaaaattgctgctgtctgtggacattatgattattattatgctcaacttgatatgctgaggaggagagcccacaaaccaagttatcaccctattcctcaagaaaatactggagttgaggattacggtcaggaaacgaggcatggtccatccccaagtcaatggcctgctgagtaccttcagagaaaatttgaagctcaacaatataagttgaaagtggagaagcaattgggtcttcgtccatcttctgccgagccaaattacaaccagagacaagagctaagaagtaatggagaagagcctagattccaggagctgccatttaggaaaaacgaaatgaaggaacaggaatattggaagcagttagaggaaatacgccaacagtaccacaatgacatgaaagaaattagaaagaagatggggagagaaccagaggagaactcaaaaataagtcataaaacctatttggtgaagaagagtaacctgcctgtccatcaagatgcatctgagggagaagcacctgtgcagatggaatttcgctcttgttgcccaggctggagtgcaatggcacgatcttggctcaccgcaacctccgcctcccaggacattgaaaaagacttgaaacaaatgaggcttcagaacacaaaggaaagtaaaaatccagaacagaaatataaagctaagaagggggtaaaatttgaaattaatttagacaaatgtatttctgatgaaaacatcctccaagaggaagaggcaatggatataccaaatgaaactttgacctttgaggatggcatgaagtttaaggaatatgaatgtgtaaaggagcatggagattatacagacaaagcatttgaaaaacttcactgcccagaagcagggttttccacgcagactgtagctgctgtgggaaacaggaggcagtgggatggaggagcgcctcagactctgctgcagatgatggcagtggccgacatcacctccacctgccccacggggcctgacagtgagtctgtgcttagcgtcagtcgtcaggaagggaagaccaaggacccgtacagcccagtgctcatcctgatgtgatagtctacttctcactatacaccctatagatcttgtatcagacactttcaaatatgttgttttgatatctccctatgcctaaagagacttgcctgctaattatcctggacaaatgaccactctagacatgcacatataaaggaggaaaaatccaggatgccaccttcctcagagtgagggaaaatgcgtgaggaaggacagctgacttgatttaccttccaaggccagctcaacaactttttttgcgatttcatagggtcatttttttttttttaatttttattttttattgatcattcttgggtgtttctcgcagagggggatttggcagggtcataggacaatagtggagggaaggtcagcagataaacaagtgaacaaaggtctctggtttttctaggcagaggaccctgtggccttccgcagtgtttgtgtccctgggtacttgagattagggagtggtgatgattcttaacgagcatgctgccttcaagcatctgtttaacaaagcacatcttgcactgcccttaatccattcatctctgagtggacacagcacatgtttcagagagcacagggttgggggtaaggtcaccgattagcaggatcccaaggcagaagaatttttcttagtacggaacaaaaaaaaaaaaaaaaaaaaaaaaaaaaaaaaaaaaaaaaa

SEQ ID NO: 85 - DNA, 3401 bp, Artificial Sequence
  PPP3R2
gggcacgagccccgcccgagctcaccgcccctgctcccctctccgaccctttgagccgtggccgttgccagatgtccacaatgggaaacgaggccagttacccggcggagatgtgctcccactttgacaatgatgaaattaaaaggctgggcaggaggtttaagaagttggacttggacaaatcagggtctctgagcgtggaggagttcatgtccctgccggagctgcgccacaacccgttggtgcggcgagtgatcgacgtcttcgacaccgacggtgatggagaagtggacttcaaggaattcatcctggggacctcccagttcagcgtcaagggcgacgaggagcagaagttgaggtttgcgttcagcatttacgacatggataaagatggctacatttccaacggggagctcttccaggtgctgaagatgatggtgggcaacaacctgacggactggcagctccagcagctggtcgacaaaaccatcatcatcctggacaaggatggcgatgggaagatatcctttgaggaattcagtgctgtggtcagagacctggagatccacaagaagctggtcctcatcgtatgagcctttttcttacaagcaccacccaacaacttctgctttcttccctatctctttcaagatttgctcaagacgtccaactgtctctctgacttatctggaagtatttctttttgtgaagccatatgtcctaacaggagcttcatcaccaactcagtgctattaattctccttctctgaatgactcagggtaccctatagggggaagagcaagtcaaatgagcatagtggggaaagaaaaggaaatggcttttataaacatcttttactttgttttgattcaaagaccaaactagaactttaaaagttcaaaaataagaaagtatacatttttgctgttatttctcatcattttgtatatgggaggaaatttataatttgcatgggtgttaggtgaactgttttcatttgcttgtgttcagatatcttgccagattgttaacttcctattgtagcaacagggacaaatatatttgtctttgctgggcatctcgtaatcacttttcttaggggacagaatcccatcttttccttcggcagattgcagccccattccccacaatgcatccagaaatcgctgtgcatgtttgaggggtaggagttcatttggcctcctcctgacttgttgctccagctcctgaacagaaactagcttcagggctcttataggaaatgctaagcctggactaagtgcccagctcagccatcatcctcattagcagtgggtttccagggttggcagcccacaccagcattaatttcaatgaaggggacctccagctaaatagggcaagcaaagtgttctcccagaaagtgctctcacctccgacactggtccctacccccaggtggagacaatgagacatttagttagttgtcctacggaggagaggcagtagagtcaggctgcagtggaatctccctaggatgccaaagtggcattatgtctgttgctcacagatgcagagactgacaattgtgtctccacagcagaggtggatgctagctacaccagctatgctgattttgaaaatcagatctgaggcctagaagagaaactgagagctctctcattccaggaagccttttccctagtggaacattcagtgcagaagtcctcacacactaacagatctccaccattgggtgagccggagcctgtggttccaggggagatccagaatgcatgtgtctcttcccacgcatttatgtcatgttggtagctttagatcagccatggtgagaaaagaacaaaagcttttagttgtttttgttttgttttggagaatttgtttaccagtaaatacatcactgcctgtaccccaaatgttaccagctccctgaggtgtcccacatactattgtgagttctcagagcatgaactgtcctcagaagagcagggctaggacttgtcccagcatctgtgcctccataccaatcctctttctcacagagaaccacttcccatataagatgcttaaggctctcaaaacagcagaacaatgaaacatactctccctacacttgcttagccaagagataccactcaggtaacttttttcaggacatggaagatctgtttcaaggagatttactgctattttatttggaagaagctggcaactggtcttgaccaaaatagaaaaaaaaaaaaaaagtccacaaatttaatcacttgtagggaacccatctatcaaggtaccctaccatatacttttgtatttaatagattacttagaaaccacaaaaataggaatccttaccccttcaattcctgttcaaccctaaaaactgtgataaacgctcccaaccctgtggtgatcagggttatgtaatgttcaaagattcagacacacctgggtttggattcagttgcaactgggttgttatcacactcacttctttttagctgtgtgagcatgaataatttacttagcctctctgtgtctttccacctaattaaagaggatccaccccagggttattttgaggattcaaaaaggcatgcaacacacctggagcacaattccactttcattcaactaattcccttcccttcccccttcttccccttctacaagatcaatatgtaaaggagacatgaggcttactggttgcttttgaacacttacttagttcttagctacacccactctaaaattaactggacattagtgtacagcccatgtccaagcccagagagaaaacaatgggaacaatttcaaggtcctcaccactccttcatttgcagaggggacaacagactttctgacctgagaactggagaatttttaaaacaaaatctctcattccagcccaacctatttaactttttgtggaggaattttacatggaggaagtgagcacatgtcatgctagccaagaggacattattgtcattaaagagaggcattatttatacaccctgcaatgtgcacattaaaatatggaaattttaaaattatgaccaagggcttgaaacatattggattacatgctcacatttaacaaagagaggaaatgtgtttcagtttctggagtggctggaatttacaagctaattgttcaataaatctactcaagatagttacctaaggctttgtggcaatgaccttgaactgagagcctgtatctggatttagcacttgaaagatctaactggatatttgggttaaaagaatcacatttattcccaaatcggaatgctttgtttttcctgtcagttaattgccagttgccaacaaatctagttctatacagtttcttgggatgatgataataaacatttattgagcaaaaaaaaaaaaaaaa

SEQ ID NO: 86 - DNA, 6115 bp, Artificial Sequence
  LOC105373660
aactagtggttaacttttgtaaagtccagtaatcaccaagcatctatgaaataaaattattcatcccattttttggccagaacaattgagtcacacgcatggtgtgccttgtccaaattttctactttagtacagggaggggcaggagtgggtggctggggggaccctttaccctttaaatttttagttgactaatttagtgtcaagtctcattttacaaaaggatcctgaggcttatattggtggtgtaaattgccaacaaggtcaatgaactagagaaaataatgtcacgattcagagtaagagaaagaaaaatggatggattgatgtcttaaccttcagaatgttcaaataattgggggttggatgacatggcatatggttaagtcttcttgcagctgatgtcacccagactttcccctttttttgccacccaaactgcatgtaaacaaacagtccaacaacaagtgtcctcaagcagggcgctccatgcttggagcaatctagtttgccgccaccagacacggctctgcttggacaccacagcgcctaactccagacttgcccctaaagtcgttcaatgatcaccctcttttccttccttctcttcctttagctgcacgagagagagagagagagagagagagagagagagagagagagagaacctcatgcctccctagtatgcttcaactgcttctccccatgcctcaattccccttccctgccgccttctgtcattttcaggtagtggaatttgctgaccctggccgcttggcggcctaagcctggacgtggcaaaagtcagatagtcacagtgcactattgagttcatctgtgtcacaaaagggcttttgctttagatctctagtttggttcagtaatttccatggacttccttccttcactgaaaagagaggccaaatcatatgcttcttcctcattttacctcaaggaacaggttacacaagttaaacaatcacaccagcattaattttctaaaaaaaaaaaaaaaaaaggagtaaattttcactttctgaggtggcaaggaaaattcctcaaacaaagagaccactcttttactgtaaacaaatgtacttacaatttttttactccctaattctttgggaaataattttttaagtccttcctaagtgttttagactaagccacctttttctctgttagcttctttttactcatcaagattatctgttggcagacagctgcatgatctatgacccacaccctaaaaaaagggagcagtttgaaagtgactataaattttattcattctctggccaaagttatcttatgaagtattgataacacattatcttacagagcagaataatactgcacaaaatgatactaagaggtttaagactcctgccttactgaaagttattattcagaagtttacatagtctgcaaacacttatcagaagccctgggcagaaagaacagaacctccgtttcattaagatacagtggaatgttagaggtttaggacagataaaggccaattctcaaaagttcaaaatcttccttgatgataaacaacgacataaattaaaatgaatgtctcttggaggtgaagacctgaatatgggtattcatacatgactataaagttttaccaagacctgcctttctcaatttattatggtggaaaatcacagaatcactgtacaaatcacttttgtattgagcccaaagaggtcacactgttgcatatatgctcttttagtgaagaaattcctgatacaagcaatatcaaaatattcagttaaattatttaaaaaatttagtttcatatcatcagaactacccagaatctatataagttcatgaatatgctttacataatgtaactcactaacataggaaaagaaagctatgtactgttaggctcactcaattttcaagccaaggaacatatttattgttaagacttataagaataagaaatcactcttcccttattcttcaaatattttttgcaaaataaattaatcaatacctacaggaacacctaatttactatttttgaaagaggtaaaataaagatttaagtgatgagtttattcaaaatttcaaattgcctgacaagttaagatatagtaaacatatattttatgaagacatcttgattttttttggtgaataatttacctttccttacaaagcatgtatattttaatagaaagacactttaggtatatttttctcaatactatttttgaacttacaacactgatatcagtttaagtttttttaaaaaatctgcactcgccttttttctgcacatacattgcgtggcacagaaagcattttggagtattgtaacatagttgcacttagaaataatggcaaaattctcatgtgctgtcccatttttactggacttttcaaagagtaaaatttcattatttttcaatgatatttaattttcacatgacactttctgaaatgttaatgcagtcccttatcaatgtagatatttttcaaggcctgtgtttttattcaaacttagatccttggggaaaagtaggctaatgacaatagggaaataaatattacagtttcaaaaaatagatcattgaaataagagttaaaaaagtattttaaagaatataatttaaaaataaatcttaagagaaagaattatcttaaagggaagatatatggcatttcaaaatgtttagaaatgtttttagctaaagaatccacaaagttttttagctaaagggccatatgccctattttaataaaaaggaatccataaaaaataaattactttcactaagtatatgcaaattccaatgtaagcaatcagtgcaaaattaattttgccagaactgattaaaagcattaataaatctatatgcagtattgcttcaatctgatactgtaaatttattatacttcctgtaagattaattataatgctacaataacatattacgatgccagaacatattactgtacattctgttaataacagttaagcgtaacctgagttgtaattatggactgtaacaaagtaatttgatagtgattgttttctttaactgttaatgttagatgggaaataaaatgtgtatgtgcttgtgttcattatatttttctctttaatacaatacctaattaaaatcatgaaacaccacagtatttgttctcacagattcctttcacttttcgctccccaccaaaactgtcaggctgcctgagataagggaaggttaaaaacaaagttattcaaggttgttgtgcattcttgtcctgaacgaaagcaagctttcttgaaaatgtatttaaaaaaaaaaaaacagtttgtactgttcaggactcatcatttgaggtcttcagatgacatagcaatttttccatgttattcacacatcccacaaataagtaacaaaatgcttgagagatcatggtgacagcagccattccaggtagcaaaacaaagacgctgaaaatcctttatgaagagcaaaagaggccaaacagaaacttttctttttggtagcttcatccaaactttctattgtctttgcactctaacattctgactgcatctaccacaatactaagctcatctgatctgatagtcgtagaaacataagactttgatgacatctataacttatggtcctttccattttgttgtcctttttcgaaagctgaagcagctacgtatgcacataactttaagaacacaaaatctgaggccctttagaatactatacacaaacttcgagtggcaaacaggtttctggagaagtaccaaaagaaattattcaagttaagctttttttggatatattcctgattaagcctgaacacaatgaaaaaaacagtgtgaagcacaattctgaatggcatctgtgcttggagcttcagaggactgctgactgtcataaaactctgtgtgtcaccagctgggggtcggggatttaaagatgtcagggggacctggcctctcagatgggataaagatcagaaggaaagctgtccaggtgatgcccaggcccctgaacaggcctatctgcactttcattcaaatgataatgagtgtgtaaatcacatctgttccccctctgtgcctgtatccttgtcacctgaatagcatccccaccaggtatcaaatgagctacaggaaataggttttctttttatccaacttcactctgaaatgagaaaatgagcaccctgacaaggaagcccacaaaccaacagggattccaagcccagatttcatcataataaagaatgtttaattgttagatgaaggttcagtcggtgagggggaacaccaaggttttgatacaaaggtagctctctggctcctcactgcccaattcttgaatagcctcagaaaagtagcctgataattagtagtcactgacttttaatgatctgatctcattctaatggcacaaccccaaaatctcaggcaagaccagcaattctcacctctctgtgttcttttaagtatggaaacaagggctgatgagatggaagcactcctggaagcctgacaagctccacacagtcctacagcgttccaccatgtaaaatcaggccttcattttgaacttggaaatctccccactcgcaggcagtggcaatgccagcaagccacaggtgggcaccacatgagcaggtgagaaatgccactagtaaggggaggttgaggatctggtgcctctaaaagagcacatcaatcctaattatcctgcgtgggtgtaccacttatgtcgtacttaggtacttattttttttgtcaggcagtttaagagagttttaggcaaatgaacgtccgtgccttggaaatccctgagaagacgtgaagcagcctcagaaagagaaactggctgagctttcagcctgcgcacgctggggcaaggaagctgcactacactgagctggcataactgcccttggcctggccggcagcatctcgtcctgcaaactgagagaaacctgagaatgaacttctacactgcacctcagaagggagcaggcgggagaggaagccgggttgggaagtcagagtagaatctgaacacagaagacagggggagctattcaggaaaatgtgctttgttatttccttctggcaccttgctcattaccattctaatttttaaaatgcaaactgaaacccatactaactttaacatcctaaatgacaaactaaaagcaacacagctcccccttccactccagtaacacccctcatccctaaaaaacaacaatgctaacaaaacccatgaacacctataacaagtacagctttaaaatccaaatccttgcttttcttggcttttaggttgaaaggtagtggaaagtggctgagtaagaccccgtcagattcagtgcaaggtgaagactggtcttgaaactttgtatcttcccttcttgattagaatgaaggtagatgccttgactcagaattggtggctgttttaaaagctggccttgctttggaccattgttgggactgtcttcttcagcaaacagtgatcatgaaaccaaattcagctttcttcaggaaaaggacaaaaactggggtataccactggatctactatggaaaagtgtttgagtgatgcccacctaatatagaagaacttgtcatagctctgatgcagcgacaattgaccacttgcttttacataaacactaggaagaaaggcatggcatcaagtgttttgagagctgaattacatcaatatttccttttcagaaaatctaaaattatttcaatgcacaaaaggtacatactgaatgtaattataactcttcaaaaaaatcaatctctttctctttttaaacttacataaaaataaattatctgactattttacctttggattattctctctaatcaacactctgatttagaataatgcaagaaagtaacgccttagtgtcttagtaccatttattaattccaggtataccactggaattagtacaacaaacaaatacgaattctactttccaatctttaaaataagaatcatgcaaagaagtgtgtggcttacaactgcatgttacttatagcagctctgagtatggtgctttttttgttttgttttgt

SEQ ID NO: 87 - DNA, 1496 bp, Artificial Sequence
  LOC101930370
ctcagcgggcttgggtcgtccggccgcggggtcagggaagaccagaggaccactagccccaggaagcttcccaccaccagcaaactgcgtggtgaatttgtaaccgaaaggcccaggtgagatgtgcaaatatcactggattggaggagctcacttggaaagccagtattcctcctgagctaatgaaaagaaaggctgtcgtcttatgccaaaagcaataccaaccttgttcacgggctgagatctagagtgtgtaattcacgaagtatgaatctgctgggtaatgtgatatgaaaagcgaatgcaccatttcttggtgatgattcaggtcagcgttgggacccaggaatctcctgttaatcagtaccctggtgattttgatccagagacggggtctattatctggtcctgttgtcaaggctggtctcaaactcctggcctccagcgatcctccctttttggcctcccaagatgctggtattacaggcatgagccaccatggtccacccggactccttttcataggagacagttccctaggcagagactgggcttgaaacaggtaacttacaaggcatcctgtgatcataagagaataattccatttgaaatcagcagctgaagtccacctgaataattaagtctttcacttgtgttattttcacaggggagacagttttttattcttaagaagttcctctaaagaagagggtagagactagaactgaatgagatggacatagagatggccaagaaaagcatcgtcctctgccaagtcatggggtcatgtgtggtggatggtgacatggtgtcctcagctcagagtccagctgggggctcagaagcaaggtaactgaagggagagaattatttgagcacctagtgtgtgtaagatgcttcacatttattatttcacctaacctctacacaacctgttgtgggtattactggtctcaagctgggattcaaagcaggtttttccaacctcagaattcttgccagactgattagccttctgcatctggaacataaatgttttcaggcagcataatgtgcaagaggtcagagcctaaagctttgttattttttaatttctccaccatgtcaactctgttacagggaagcccagcagagggaattgtatccattttggggctacactaccccaatgctatgctgcagccaagctgaacttctaagtttctaaatgtaactcacttaccttcaggcctttgtacggggagttctttttgcctgaaataccttctgacatcttaacattacgcttagatgtcagttacaaaaaagctttttctagactctctcacatgtcccactccacacccctatatctcttcccaccaatgtactagggtaggtatcctgctaggtacttccactgcaccctctacttttcttccctaatgattaccactatattgtaattgcttaatttctttttcctatacccagataaaaatgtgtatgaaggtgga

SEQ ID NO: 88 - DNA, 1919 bp, Artificial Sequence
  TRAT1
aagacaactccttcaccacatttcctgtttgtaactgaaacaaagtacacacaaaagattttaagaaacagaagagaaaagaatccgaggcacagataaagataagttttactgtcatgctgcttttaacataacagagcaacatcacctaggaaaaaagtttgtaggaggatttttaatccatatatttgtcttatggctagataaagatttctctgaaaaaaagaagcatgtcaggaatctctgggtgcccctttttcctctggggacttctagcattgttgggcttggctttggttatatcactgatcttcaatatttcccactatgtggaaaagcaacgacaagataaaatgtacagctactccagtgaccacaccagggttgatgagtattatattgaagacacaccaatttatggtaacttagatgatatgatttcagaaccaatggatgaaaattgctatgaacaaatgaaagcccgaccagagaaatctgtaaataagatgcaggaagccaccccatctgcacaggcaaccaatgaaacacagatgtgctacgcctcacttgatcacagcgttaaggggaagcgtagaaagcccaggaaacagaatactcatttctcagacaaggatggagatgagcaactacatgcaatagatgccagcgtttctaagaccaccttagtagacagtttctccccagaaagccaggcagtagaggaaaacattcatgatgatcccatcagactgtttggattgatccgtgctaagagagaacctataaactagctggaccatgatctagttcaatgatttggctcctattgaagatggcttctaagaaaacaagatgcacagaggacacagaaggacttggcagcagggtgatgacctgatcatttgttgatgggatggtggcttacctcttattcacagcttacacttatgcatgccaaatgtaaggccatgaaaatcagtatttcaaataacttaaaaaatgctttactactaaaatgtaaaaaattaatgtgctcacctcggcagcacatatactaaaaattaataagacccagcttgaaaattgagcctgataacaagattacaaattcacaatacctaatacttagggaaatataaaaatttaagcatgaatgtgttctggaacacgttagaagaaaaataaaagccaatgagtttttttttaattctcctttctcaccaatgggcaatagcccataattgaaataaatttctgattgaaaggtataggaaacattaaaatgcattactaagagaagtaatataattttcttacaaagtatttttcccaaagatagctttactatttcaaaaattgtcaaattaatgcatgctccttacaacaaacaaatatcaaaaagagtttaggaattctactagccagagatagtcacttggagaaactttctatatatccttctaaatatttttctgggcatgcttatgtatgtacatcagttgtttctttttattttgaaccaaaaatgtggtttcttttgtacacattacttaaactttctttccagtcaacaatatattgtggatttattttcactgttatatttaactatatataaatacgcatatattgtaattttaatgtctgcttagcaccccactgataaccaaatcacagtttatttaaataattttaatgacttttcaaaaacaatttattgatgcaaaaagcaaggttgagatgacaatgtttctttcaataattaaaaaatactgcttcactgtcttctctctgtttcatcagaaacacatactataatacttgtctctgtccttaagtgtgatacacgctatttttctgattgttaagactttccttattactggttctaatttgattataatatgccaaggtatggt

SEQ ID NO: 89 - DNA, 2331 bp, Artificial Sequence
  SPX
attcctctacttcctgcaatgaagctccctggaggagtcatcagattctcaatcttgcttgaagactgacaagatgtccctgtggactcccaaactctactccagatggggaggtgcccttaacaccaagattttaaaagctccaatttcagagcaagagtcgaaaactcacagataaagttatagttatttcagggttctgaaaagacgcagaacatgaagggactcagaagtctggcagcaacaaccttggctcttttcctggtgtttgttttcctgggaaactccagctgcgctccgcagagactgttggagagaaggaactggactcctcaagctatgctctacctgaaaggggcacagggtcgccgcttcatctccgaccagagccggagaaaggacctctccgaccggccactgccggaaagacgaagcccaaatccccaactactaactattccggaggcagcaaccatcttactggcgtcccttcagaaatcaccagaagatgaagaaaaaaactttgatcaaaccagattcctggaagacagtctgcttaactggtgaaaatatactggattatgtttaattatggttctattctctttgaaaacatgaaccatgtgaataaaacctttggacccttttattccatttgtaatcttaagaacacacacagatagttttattctttcagaaacaaaatatatataggatgcttagctgagaacatcatcttctttcattgcttcaggtcctgtttagatgaccaaaaatgttttcagatcaccttgtgtcttactcttgagtttcttagaatatttataattataaggctgaagactaaagtgttctttccttttaactatagccagtacctgtcttgatcttagttgtgtttttttttcattttgttacccacttgcattttgttttcactcagcagaaattctccttctctgttttccttttatcccatccccaagaatgtggaaggaaggtgagaaacatggcaggatgggaaataggagagtatgactctctatagctcatccaggagtaatcaattaagaagataaattggatgactgtggagaagctctgtgataggaacacttcagtgtggttgctgagaggagacagtcattgaggtagaaggtttgccaaagatccagagctcagagctccctttgtgctctttgggaattaccttgcattcagtttagaaacatggatctaaaagttactgggaaataagcagatggagacacactctgttgtttacgtattggaagaagggaacaagccagttttgttagaggtaactcattttccatgaccaaacagactcaacagattcaagtactctgcttactctaattgactagactctaggttttatttgacatcatagcattacataaatcactctgataacataagtgcacagtaatatgcctgatctcttcctttttaaaagccaacttgagttcagtaccatctgaatacacacacatgcacatatacccacacacgcatacacacatactcctgtggcaaacataataatgtatttatttagaattataatatgaccatcatgttaattattttttacctaatcagagttgttattgacaaatgtcataagtggaaagtattaattcttattgtcatcagtatttagccattatttagtagctcaagaatatctttatgtgaatgtctctgtaacttggaattgcaatttcactgtgttaagtaatcagaactctgcttataagatttatctgtatcttgtttcataatttaataatgaaactaaattcaagttaatgtaatgttgatctccgtcgaaaaataacttgtgagcattaaaatatctgtatggcattataataggcacctgtcattaattatgatttgatttgaaagtagacttactaggtagtgcttacatctgatttattgaaaattttttccaaaagcattgtcttttatttatacagtcctaaccacttcaccattaggaggggtgggacattaaaaattatttacccatcagacataaaattgtacaaattgactattcaaaatagtatgtgtattcaaagaacacttttaacatctatcttatgaaataattcttcctacaactaaccagaacaatctcaaaaatgtcatactaaccattgttttaaaagctgtctcaatgatcaatagctgttaaaatatagctccaagtattctaagtactcaaattccttgaatgttcttatgtacaaatatgctgattaattaaaaggtccctcttcccaaaaaaaaaaaaaa

SEQ ID NO: 90 - DNA, 5431 bp, Artificial Sequence
  TMTC2
ccagagcccggcttggtccggtccctctgcccccatcccgcacccttccacctcctccgagtcccactcctcacctaggacgccccaaactgccatgggttagggtggggatcgcgacccgcgcgaaagaccagccctgcgcttccgccgggggacgcggagcccaaacgccgctcaccgcttgcgggcgccgggcatggggagtgtggtgtgagcccgcacccggggaggacgcaggagctgcggagacgggcgcgaggaggaggagaggagtcgtggattggaaggacccgagggagggagggtggggaagcgagggaaaagtgaagctgggaggagaaggcggcggaaggtggagattgatgcttctgttttttgttgccgctgctgccctcgcgctgggagccgagccggagggaaggcggtggagagatgattgcagagttggtgagcagcgctctggggctcgccttgtatctcaacaccctgagtgcggatttctgctatgatgacagccgtgctatcaagactaatcaggaccttctcccagaaactccatggacgcacattttctacaatgatttttgggggactcttctaacccacagtggcagccacaagtcctaccggccactctgcactctttcttttcgcctgaaccatgccattggagggttgaatccctggagctaccatcttgtcaatgtcctgttgcatgcagcagtcactggtctcttcacaagcttctccaagatcctccttggtgatggatactggacattcatggctggcttgatgtttgcttctcaccccattcacacggaggcagtggcaggaatcgtgggacgagccgatgtcggggccagtctcttctttctcctctccttgctctgctacattaaacactgttctacaagaggctactcagccagaacctggggctggttcctggggtcaggactgtgcgcaggatgcagcatgttgtggaaggaacaaggagtgactgttctcgcagtttcagcagtttatgatgtctttgtctttcacaggctgaaaataaaacagatattacctaccatttacaaaaggaagaacttgtcgcttttcctaagcattagtttgttaattttctggggttcctcccttttgggtgcccggttatactggatgggaaacaaaccaccaagcttttccaactcggacaaccccgctgctgattcggacagcctcctcacccgcactctcaccttcttctacttgccaaccaagaacctctggctgttgctatgtccagataccctcagttttgattggtcaatggatgctgtgcctctgctcaaaacagtttgtgactggagaaacctacacactgtggccttctatactggactccttctccttgcctactatggtttgaagagcccgagcgtagacagagaatgcaatgggaaaactgtaacaaatggcaagcagaatgcaaatggacatagctgcctttcagatgtggagtaccagaactcagagactaagtccagctttgcatccaaagtagaaaatggcattaaaaacgatgtatcacagagaacccagcttccttctacggagaacattgttgttctgtctttatctttgttaatcataccctttgttcctgccacgaacctgtttttctatgtcggctttgtaattgcagagcgagtattatatattcctagtatgggcttctgcctactgattacagtgggtgctagagccctttatgtcaaagtccaaaagcggttcctcaagagcttgattttttatgctacagctacactaattgttttttatggactcaagactgcgatcaggaatggagactggcagaatgaggaaatgctttatagatcagggataaaagtaaacccagctaaagcatggggtaaccttggaaatgttctgaagagtcagagcaaaatttctgaagctgaaagcgcctatagaaatgctttgtactaccgcagcaacatggctgacatgctttataatttagggctacttctccaggagaacagcaggtttgcagaagcactacattattataaattggccattgggagcaggcctaccctggcttctgcatatttaaataccggtattattctaatgaaccaaggaaggacggaagaagcccgacggacattcttaaagtgttcggagatcccagatgaaaacctaaaggaccctcatgcacacaagagctctgttaccagttgtttgtacaacctaggaaagctgtatcatgagcagggacactatgaggaagcccttagtgtatacaaggaagcaattcagaaaatgccaaggcagtttgccccacagagcttgtacaacatgatgggtgaagcatatatgcgtttaagcaaactccccgaagcagagcattggtatatggaatcactgagatccaagactgaccacatccctgctcatctcacctatgggaagctgctagctctaacaggtcgtaagagtgaggctgaaaagctcttcttgaaggctattgagctggatcccaccaaaggaaactgttacatgcattatggtcagtttcttctggaagaagctcgtctcatagaagcagctgagatggcaaaaaaagcagctgaactagacagcacagagtttgatgttgtcttcaatgctgcccacatgctcagacaggctagcctcaatgaagcagctgagaagtattatgatctggcagccaggctgaggcctaattatccggctgctttgatgaacctgggagccattctgcacctcaatggcagactccagaaggccgaggccaactacctgcgggccctgcagctcaagccagacgatgtcatcacacagtccaatctccgcaaactgtggaacatcatggaaaaacaaggcttaaagacttctaagacctgacacaggaggcagaagcccatcctcctccatttttaaaagctggcttccttagcagacagaacttcccagcagtgctatgacaagagctggtgttagacttcaagaccagggcagaggtcattgaggtcactaccgcttctggaagaatccactttgctgtaggcacagctgttaacaccaaaaaggggaaagccggaaacctcctggaggatgtcattgttacccatagactgtaaaccagagcacttaaaacagaaccttttggcattcttaaaaagggaggggtgggtgtgtaagtcacagattttgttcattttctgaaagctaatttcaaaattatgttgttccttaaacactgtgagaggaagtcagagtgtccattcaggcatggcaaacaattagggttaagtgttacgagggagtgataaacacgtagtgtgagtcccagtgagccgccggttgtcctaacgctgctgtcttccctgtttgggacagcctgcttatcaatttctgaagcttagaacactttttttaatactgtgtcaagatctgtcagaatctgctatgtttcttgaccagtgcacataatgttttatgatttggatgtcagaggcttcattcttttggacatcatttgctttttatgttctgaaaaggatatggagagtagagctaaccatacttcacactcgagttgtatgagggactggggaggccttatatgtgtcaggcaggcattttttaaattttaatatcgtcaatattttcccccaaactgcccagtagaattcattgtattaattcttttgaaattacctttgaaaatagctattcctggagaatgtgcaagcttacataaggataaaggacaggggaggagtttgtaagccttgcagttccaataactaaccaacaggttattagacaaaagggaaggtgttttgtgcttctcagatgttgctggtttaggagtgtgtgatgatgcttgccagtgattttgtgttttggaaagggtaggtatcgaatgttaatcactttctaatgggtacctaaacagcaatgctgataaatgttcaaggaattattttcatcttagtttgttcttctcaaaaggcatcaaaaacaacttatttgaagctgcaatagagtgtagcattagcctgcatgtttctaggtcttctgccaagtgcttttctcagttgaaaactatttttcactagcaaaattggtattttatttcattacctgttagtaactacttcaatgatcatttcacaagaaaaagactataaattaagtagagaacaacatttttattgaacatttttggcttgcaatcaaactttgccactaaaaattaacttcataaaacactagtccgttatcaacttcttcacagagaaagtagctatactataccctacatatttatttatttattattctactatagcagaataacaaaacttgatgcattaagccagttctttgcaactgaaaattacctgtttctccttccctttcacactccatgtatatatgatcagcctctccattaaaaagaagctggacatgcaaatacatcatattatgttttctccatattttatgtttttctatgtatctgaatacagtgggataaataattgaaagtagtgttcctatggcattagtgtttttgtgagaagggtaaatgtagtgagaaaggttttttcatggcattaataagaaagcccttctgtaatatatatattattttgtaaacatttcactgaagggccaaaagttaaattataactaaatcactgtgttttcagaatgatatttaacaacaaacccgtggtcaaaccaaaatagtgggttgaagtgtattattcatcttttagtgcattggcaattgcaaaaaaaaaaaaggaatttaatataaggctatagagattaattcagtgtctaacatttgtatttatttaaatagttattgacctatgatgactttctagtcttaacattttatctttttattgttgttgttcttcctttcaaagatgtggttcttaataggttcactgaatgcacagttgaggcacttcttgtgacaccagttcccaagtagcgttaataattgggcctgtgtcataaaatgcacggatcattaataactaaatgtccctgacacttttcactacagggctggacttagtaactgaccaacttcggggggagggttggggcaagggggggtgggcgttagaacatgatcaaaaaatgtctccgctcagggatttatggtggattattgcagacagtgctaaaaatatagagcacaagacaagtttactaaattaaaattttattttttgagaaactgttatttgtataaattatcaagatttgtaggctttccttttgtagaaataattgttttatgtgccagagaatttcaattttgttttcaacaataaagcattgataagaaataaaaaaaaaa

SEQ ID NO: 91 - DNA, 10416 bp, Artificial Sequence
  VGLL3
ccacggctgcccgacccgggcctgggctgtggctgtgactggcgctgccgtgggcgccgcagccctcgcgggagccggacgcggtaatgccccagcggcgcagcgggcggctgcgtccctgagccgctatataagcgcggcagggaacatccggaggggctgaagatgaaggtgcccgcgcatgggcccccgctgattgccagtccctcccgaccccgcgccccgcgcggagcccgaggccgccgaggacccgccttcgccgcagtagcagctggagcagcgacagaggcggcagctgcggcggcggcggcgcccgcgcccctcgcgccagcgcgtagagcggcggcggcagctcgggggccgccactgccccggctgccatgagttgtgcggaggtgatgtatcacccccagccttatggagcgtcccagtatctgcccaaccccatggcagcgacaacctgccccacagcctactatcagccggcgccccaacctggccagcagaagaagttagcggtattcagcaagatgcaggactctctggaagtcacccttcccagcaaacaagaggaggaggatgaggaggaggaggaggaggagaaagaccagcctgccgagatggagtaccttaactctcgctgtgtccttttcacttatttccagggagacattgggtcagtagtggatgaacacttctcaagagctttgggccaagccatcaccctccatccagaatctgccatttcaaaaagcaagatggggctaacccccctatggcgagacagctcagctctctcaagccagcggaatagtttcccaacttccttttggaccagctcttaccagcccccacctgcaccttgtttggggggagttcatcctgacttccaggtcactggaccccctggcaccttttctgcagctgatcccagtccttggccgggacacaacctgcatcagactggcccagcccctccccctgctgtgtctgagtcctggccttatcctttgacatctcaggtgagcccatcctacagccatatgcatgacgtgtacatgcggcaccaccaccctcatgcccacatgcaccaccgccaccgccaccatcatcaccatcaccaccctcctgctggctctgccctggatccatcctatgggcctctgctgatgccttcagtgcatgcggccaggattcctgctccccagtgtgacatcacaaagacagaaccaactacagtcacctctgctacctcagcatgggctggagcctttcatggaacagtagacatagtgcccagcgtgggattcgatacaggtctacagcatcaagacaagagtaaggaatcaccgtggtactgaaacacacaatcttagtgagttaagttgcagcataaatccaagggcccactgggaaaagatactgtcgggtttttccattcagcaataggacacgaaaggcatagaaggagaagacaaagtgtcacgcagttgactggttttcggcctttcttgagaaagcaaagtgggtcccagacattgaagaaaagcatttttatttgtttatttcctcatctgagcctttgccaactgtgcaactctctccttttgttatcttgcttttatcaatatatagctaagtttttgtttcattttgatttttttttttagccaaccaccttgtcaggaaaggatgaaccacacattaaaatgttcattctttcaggaatacaagtttgtagctctatgtgcatctatttttgtagaaatacaaaaagtttggtttagcattgatgggctatttttgagggatgtattttttttaaaattgtaaaaattgttgagttctgtttaaagaacttgctctcagagaagcactggcaaaaatgtttaaaatgcttatctctaagatgtctattatatgctctgtctgtgctttctaggttacctcaaatgttttgtttttttccttcttacaaaagtagctataccgtagtcaaaccaatgcagtattgtttttacattgaatctcagtaaagatttaattccatgctagctcaattagttttgaattatatgtatagcttgaaaagtttttttttaatgactgtgctaaagaaatgatattttattgctttgatttctcccaaagaataacttggaggttgactaataagaaagttggcataaactttcaatcaaatgaagagtttgcctagaggagactaattctctttctagcccatccaaatttgataaatggaaccagaggttatatacaactacaaggaaaaaaatgcatttaaccatgccacctatgagtgccagtgacttattttacttgtttttaattattcattcatggcaatttaaaaagtcatattttaagtgggatttgtttttcctgaagggcatttgaaggaacaatatctgggaaggtactagagaaattacaaagcccgagctctttcttataatgccacctatccctgtaagctaaacaaacaaacaaacaaacaaacaaacagttctatatataatagtttcaacacagaacttaacaagtctctttttttgtttgtttaaatctggctttacttgatttaattcctttttagaaagaaatttagggcaaaataaagtgtatattaggatttaaatttatgccacaatttaaaaataaaaccagaggttatatacaatttaaattgggctaaaaattaaaaatttgaggatttaacttgatatagctctcaggatctaaataaagtttaaattatcattaagacactgctaggagaagattaagattatgaaagtaacagttattgatactgctggacttcaaaggcaaagttcatttcttccattaactgcttccagagatgtcatgtaaaaaagttagtgtattagagaagttttttagctttataaagaggttttttcaaatttctcccatttttctctccacccacataaaatagtatgttcagtgaaatgccactttctatctttaattgttcgtatcatatatgcgaactttttagacatgaacatgacatgttcagctaggcagagttctcatagataattttcaaatattttccttggctgtaatttatgtattcatttatatcctatccgtcttttgagcttcagatctatatactcttttgtactctcatcactccgcactttgctgtttcttacctagactctcttttacacaatatgcacatttttaccattgtggggtccaaatttaagataccttccactcactaataatatgaacttatatttcctgggagtagccaggttaaattttctatactttggtccataatttgatttgatatgattgtttcatttataatttgcccaaatacatggagcacaaaatttagtgaatttataaatctggatttgccttgtgtccttctgagttttcaaaggcaagtattcaacagtccctgtgtgatgactgacagggttatttgcctcatccacatccaccttcggaatacattaacttcctttgtaatttatttgaaagtagtgttaaactcattcagatcattcagttggattttcccaatgaagaggaaaaggaaagtagttattcctagctccatttcttattttccaccaaatttaattgaagggcattaattagatgtcttcaccctgaatttagactttgctctgtgttctcccggtaactgtcagacaaaaagtttattggctctgaggaactgagaaatgttgggaacctggtttctgctgtacacaggaaagatttgtaagtgagctctctctttgaaaacaggacccaggctgggcacagcagctcatgcctgtaatcctagtattataggaggcagaggctcgggaggattgcttgagcccaggagttcaagatcagcctaggcaacatagggagaccctatccctacaaaaaatttctgaaaaattacctgggcattgtggggcacacctgttgtcccagctactctggaggctgagtccggaggaacgtttgagcctgggagtttgagtttgcagcttgcagtgagctgtgattgcaccactgtactccagcttgggcaacagagcaagatcctgtctcaaaaggaaaaagaaaacaggacctaggtgtttggggtacactgccacccagggagtggatcaaaaatatacatagaaagagaatgagcatgtctctataattgtcttctaggaccatattgctgttagaagtcctaaaagaggatgggttgtaatttagcataatattctgaattcattccaagtttaaaatcctgtcattctctggctcttcttttttcacatcaaaatgatgctgttggacttagaggcttccgaactgttttattgagggctactatctgcctccacaattttattaaaaccactccacctttagacaaaggtgacttttgtctgattttacaaatcagattttattcaagctttctaaatatctgtgaagtagaccctagaaaattgtctcgtttattttaaatagaatctatgcttccaccaataaaccatcgggagctaagaaacaacataatgttgacaaatcaggaacctaacagattattttgtctctcattattaatttgaaagagcctctaaacttttgagaaatcaatgtgtcttcttaagaaagttaagcaccctctcttaactttcccctctatttgctctcctttttctttcttcttaagagtatttatattattttgttaagcaaaaatggctaagattgctctaaaatttgcaaaatgaggagtggattgcaaataattgagggatttatttctttaactttataagactttaaaaaaaaaacccaaattctaagcactgacatgaaagttgcctttgagaagcttgttattcattatacaaaaagtatttgcccattcctattctaagatttgcagaatatgtcaccctatctagcttttgagtttgctatctggtttaatgttgtatttataatttaaagtggaaatcagaaactgtttcaagaacctgtattctattccttactgagtgtcccttctttaaatagtgtttgctgaattaagccgatgggggcagtggcgttaagtggtggaaaaaggaaagtatatatgttagagttttgaatgagggataaatagaaagcagaatgaattaatggaaaagaactcggctgttaggccattctctaaattctagtttagccaaaagtttatgtgtggtttggggcttcatttatttatctcatgagtaaaatggaataatacctaacaggcaggctctggaagttggaaatcacatacacacacacacacacacagacacacacacacacgatcaatcatgtagctcatattagatgttcaataaataacagctactacagatgcctatcagttgagtaagtagttcattaaattgagctcccaaaggtctcttctcttcacatccatatccgtttctgcagcaatcaaatagatacatgattgtttttctgtaagaaattactgcaaagagaatctttttctcctactaactgttccttctacctggtataggagataaatgtacgtttcttaattagctgactttttagtatgtcatttctgaaggaaaaataaattaaccttaaagtggcatgtaggtccaattcagttttcctacatgttccaaaattttatttaaattactgtgtccaaaattatgaggacagtgtcattcattcaccatagtttatatttttagttatatatcaaacttccttggcacctaggataagaacatttcttttgaagttatccaatttttttttatttttacttgacttgaaggaaagttggaaaatatggtggaaaaaatcttccgcattaaaagggggaaaaacacaaccatttacgatctcagtcagcagatttactctactcaaggaaaaaaagaaacaatcttattggaagcagatgttgacactgtgtcagttattgaagacggaaggagttcacttgagccattgcagttacaaaggggtattgatggcagtttggattcctgattgatcacctttgcagccaagggaaagacagcagaaactgtatgggatcagaaatgaaatcagcctgccagtttaatggagaggctcctagaaactcattttttttctttcctgtaagataaaagacatctttcagaataagaaaggcttgtttgagagagaaattacagtttattctctgaaaatatttaaaggccaaagtgccctttaaatctattattaaagcattgaaactgttattaaaatcattatagaaaaattaggtaaaaattttagcctaactttcaacatccattcaaaaacgaatgttgaaaacaaacatataacctataaaaaagtgaatggctctggcaagtgggggcatgggtggagtccataaggaaacctcagtctcaataacttcaaaatgttacttttcatggtaacttggtcatggagattggtcacagcacagacatttagaattttttagcaggttttttttttcttttgaatcttgtagtgctctctgggaattgcaccatgtacacttttacaacctacagaaatcgtcattattgttaaagtatctcaacttttctatttcttttattgtctattgtgcttttttgtttaaaaatacttttatagttttaaagtattggtcaaagtagtattctcttgaagttctagtcaatttaatttgatccaataagtttttctgaatctcctttttaagttccaagaaattctattataaataagtgtacttttaccaattccattgtataagcaaacagacaccttttagaaaaggataagtaatcatcaatttgtttttttaaaaaaaaaaacaatttctagactactaaatttggcataagaataattcttttaaaatgcaacatactttaattagtttttttggtatatgcataagatgtgaactttcctattgatatcactttatattaatagagatgtacatttctttctatgccgtggctagagcaaaagttaataatgattatttacacaattgatttaatttcttaggatatgtataatattggatattatatctgatttaaaaatactattccatacattttttttttcaggagataaaacatagggaaaggttttcatgtgaattctttgtatcactttgaagtacatatatttaaagggaagatggatacaatttgtttttattatataaatctaggtaaggtgaaatgcttttgtcaacaaaaatacagtgtagtgaattttatatttgtcacttgattaggtaaactgaaaactaacaatagaaatattattttactgcattgaaataccatgaactttcagacttgttagttctacaagaagttgtgctaccttaattttgtgtttccagaaataaaaattaaccttagttatgctgtcatttttaactaataaaaaaagtataattcataaaacttttggctttataagataattataaaattatatatttttttctgtttttgtggggttgggaaaacattttcttatttctattcactcttcaaatgcaggtctcataatatgtgtcaatgatataagatgatggaagactttgtaataaaaacatatgtcattatcttcaatttgttcaataaataatttaatgtgaattgaatgtttgtattttaacatagcatttggatttggtctgcatttcttgagaatttaaagctctttttgtttcctccttattcaattaagcatcttataaatattttggaaattacaacatcttaggtgttattaattaagaagttaatttctagggccaagaagtctatatgttacagcaaggaatagattataaaatacatgtttataatggaaaagaaaatgaaatggggtatattaattacataacagcaagagtcttgagaattttataatacaatgcttctaaggatattggttgaccaaggtgtattttattgtttttacatttgttgacagggactctgccataagtagtatgaaaaaacaaacaaaaacttttctacgattcattaacattgaaaagagaattccaagaccttgtattctgaagaaagctagagtttctctaagtgggccttcaattttcttattacacgtatctttaatgtgaaagtactaaagtctgaaaatcagcatttaaataatagactttccagcattacagatgaaataatttggcgcaggctttttaactgtctaccatatttagaatgtggtgtcaaaatgagatttttagaactgctgtaaaatattactacattactacaacgataacggcctaaaacaacacaaatttattatcttacagctctgtcagtcagacattcagcaaagatcttagtcttggtgggctacagaatgtaggaggcatttcctggatgcttccaagagagaatcttgctgttccctgcttctagagtcctttgcttagtttccttccatcttcaaatccagcaacctggtcaagaccttctcacatgacatcactgacttcctcttcttcctctcccttacatatttaaggactcatgtgattacaatagctgcatctgtgtaatccagaataatctcttcatctcaaggtttttgttctgttttgtttttttgttttgttttgttttgttttgttttgatggagtcttgctctgtcgtcaggctggagtgcagtggcgcgatctcggctcactccaacctccacctcccgggttcaaaggattcccctgcctcagcctctcgagtagctgggactacagatgcgtgctaccacacaaggctaatattttgtattttagtagagacgggatttcaccatgttggccaggatggtctccgtctcctgacctcgtgatctgcctgccttggcctcccaaagtgttgggattacaggcataagccattgcgccatgctcaaggttcttaattacatctttaaaggccctttttccatgtacagtaacatattcaatggttctggggattaggacttggagccattattctacctacaacaattagtattggacttccatcattttctatcactcttgtaatcgagaaggactatttcactgggagtagcaagtcataatgtttgcgttggcatttgtgtgggggtttatcttcattcattaaataattgcatgtaaagaaaattcctgtcactatttcaaatgtttcatgtagttattatagtgcttcagaatccaaagggttatgtgttacttatgtaagatgagcagtctagggggtggagaacaggtcatctagtgcagattcttcctagctgaagtgtgttttctctggggacaaccaagtaggatttaattgttttgcttccttttttgggaacttagacccatcttgcgatgtcctaagtctccaagcatcttatttgacctgcttatacacatttgactaaatagctaaatatgaccacattgacgtggtaaagctttaacacttttgtccagattgaatcactccatctgctatcagttaagcagtggaaaactgttatggaaaagcaaacatgttttgatagatttaatgtgtaaagaaggtatccatactctggaatgctgctgatcaataaatgagctgcaagactttgttcgaaacaacactcaagcacaactgttttactttccataccaagtttggctgtgactgaatgaagaacatcagcattgatctttgctttgcacttgtacaagagactatttgcagagagccaaatatagcaacagaggatttaatatcttgccaaaaaatacaaaatctgttcccctttaagcatgacactctatcctttcttgtggatcttgctaaaaggaaaatatagctttaaactcccctattccttctgttgaaagcttaagaatctttttcaaatgagctatgtatggttttgtggtattttatgtttccaaaagaaaatggctacatgaaaaatctgtccagtgttatcatttttcttacaaaaaatacttctagttatggttgtattaattaatttgattgtgataatgattacacaatgtttacctatatcaaatcatcatatcgtataccttaaatatatataacttttatgtgtcaattataactcagtaagtctgggaaaatatcgttaagtcaaagattagagtcaacagaaataaagaaaaatcatactttgataacttcaggactaatcaaggatcaatgggtgacatgatatcatgctatgtgccattttgtgttaaacaaattacaccaacaataaaaaaaattggcttcaatcaa

SEQ ID NO: 92 - DNA, 8020 bp, Artificial Sequence
  COL14A1
atctgatcctgggctcccagctggagaggcggaggcagctccagggggctggaagtggaagcgcagcggcagaaggagagggagagagaaagagagagaggctaattaaaaaaggatactccgagggaagagagcaagggcggtgcgccgccaaggaccaactagcggcggagcttcgatcttgcctaggcgcggagagctcccaacctgggctggaaccttgcccagcacaggtggctgctacaccccatgtaaaaagcggaaaataaaatgaagattttccagcgcaagatgcggtactggttgcttccaccttttttggcaattgtttatttctgcaccattgtccaaggtcaagtggctccacccacaaggttaagatataatgtaatatctcatgacagtatacagatttcatggaaggctccaagagggaaatttggtggttacaaacttcttgtgactccaacttcaggtggaaaaactaaccagctgaatctgcagaacactgcaactaaagcaattattcaaggccttatgccagaccagaattacacagttcaaattattgcatacaataaagataaagaaagcaagccagctcaaggccaattcagaattaaagatttagaaaaaagaaaggatccaaagcccagagtcaaagttgtggacagaggaaatgggagtagaccatcttcaccagaagaagtgaaatttgtctgtcaaactccagcaattgctgacattgtaatcctggtcgatggttcatggagtattggaagattcaacttcagactggttcggcatttcttggaaaacctggttacagcattcgatgtgggctcagagaagacacgaattggtcttgcacagtatagtggtgaccccagaatagaatggcacttgaatgcatttagcacaaaagatgaagtgattgaagctgtccgaaacctcccatataaaggaggaaatacactaacaggtcttgctttgaactacatttttgaaaatagcttcaaaccagaagcaggatcaaggactggagtatccaaaattggcattttaatcacagatggaaaatcccaagatgacattattccaccatctagaaatcttcgtgagtctggtgtagaactgtttgccataggggtgaaaaacgcggatgtgaatgagctgcaggagatcgcctctgaaccagacagcactcatgtgtacaatgttgccgaattcgatctgatgcacacagttgtggagagtctgaccaggactctctgctctagagtggaagaacaggacagagaaattaaagcctcagcccatgccatcactgggccgcctacggagttgattacttctgaagtcactgccagaagctttatggttaactggactcatgccccaggaaatgtggaaaaatacagagttgtgtattatcctaccaggggtggaaaaccagacgaggtggtggtagatggaactgtatcttccacagtgttgaaaaacttgatgtctttaactgaatatcagatagcagtctttgcaatctatgcccacactgctagtgaaggcctacggggaactgaaactacacttgctttaccgatggcttctgaccttctactgtacgacgtgactgagaacagcatgcgagtcaaatgggatgcagtgcctggggcctcaggttacctgatcctttatgctcctctaacagagggcctggctggggatgaaaaagagatgaaaattggagagacccacacagatattgaattgagtgggttgttgcccaatacagaatacacagtcacagtttatgccatgtttggagaagaggccagtgatcctgttacgggacaagaaacaacattggctttaagtccaccaagaaacctgagaatctccaatgttggctctaacagtgctcgattaacctgggacccaacttcaagacagatcaatggttatcgaattgtatataacaatgcagatgggactgaaatcaatgaggttgaagtcgatcctattactaccttccctctgaagggcttgacacctctcacagagtatactattgctattttctccatctatgatgaaggacagtcagagcctctgactggagtttttaccaccgaggaagttccagcccagcaatacttagaaattgatgaggtgacgacagacagttttagggtgacctggcatcccctctcagctgatgaagggctacacaaattgatgtggattccagtctatggggggaagactgaggaggttgtcctgaaagaagagcaggactcacatgttattgaaggcctggagcccggtacggagtatgaagtttcactattggccgtacttgatgatggaagcgagagtgaggtggtgactgctgtcgggaccacacttgacagtttttggacagaaccagctacaaccatagtgcctaccacatctgtgacttcagttttccagacgggaatcagaaacctagttgtaggtgatgaaactacttctagcctgcgggtaaaatgggacatttctgacagcgatgtgcagcagtttagggtgacctacatgacagctcaaggggaccctgaggaagaagtcataggaacggttatggtgcctggaagccagaacaacctccttctgaagcctctgcttcctgatactgaatacaaagtcacagtgactcccatctacacggatggcgaaggcgtcagcgtctccgctcctggaaaaaccttaccatcctcggggccccagaacttgcgggtgtccgaggaatggtataaccggttgcgcattacgtgggaccccccatcttccccggtgaaaggctatagaattgtctacaaacctgtcagtgttcctggtccaacactggaaacgtttgtgggagctgacattaacaccatccttatcacaaacctcctcagcggaatggactacaatgtgaagatatttgcctcccaggcctcaggcttcagcgacgccctgacaggcatggtgaaaacattgttcttgggtgttaccaatctccaagccaaacatgttgaaatgaccagcttgtgtgcccactggcaggtacatcgccatgccacagcctatagggttgttatagaatccctccaggataggcaaaagcaagaatccactgtgggtggagggacaaccaggcattgcttctatggacttcagcctgattctgaatataaaatcagtgtttatacaaagctccaggagattgaaggacctagtgtgagcataatggaaaaaacacaatcacttcctacacgaccaccaacttttcctccaaccattccaccagcaaaagaagtatgtaaggcggccaaggctgacctggtatttatggtggatggatcctggagcattggagatgaaaatttcaataagatcatcagctttctatacagcactgttggagccctgaacaagattggcacagatggaacccaagttgcaatggttcagttcactgatgatcccagaacagaatttaaactaaatgcttacaaaaccaaagagactcttcttgatgcaattaaacacatttcatacaaaggaggaaatacaaaaacaggaaaagcaattaagtatgttcgagataccttgttcactgcagagtcaggtacaagaaggggcatcccaaaggttatcgtggttataactgatggaagatcacaagatgatgtgaacaaaatctccagggagatgcaattagatggctatagcatttttgcaattggtgtggccgatgcagattactcggagttggttagcattggcagtaagcccagcgcacgccatgtcttctttgtggatgactttgacgcctttaagaaaatcgaagatgagttaattacttttgtctgcgaaacagcatcagcaacctgtccagtggtacacaaggatggcattgatcttgcaggatttaagatgatggaaatgtttggtttggttgaaaaagatttttcatcagtggaaggggtttctatggagcctggtaccttcaatgtgtttccatgttaccaactccataaagatgccctggtttcccagccaaccaggtacttgcacccagaaggattgccctccgactacacaatcagttttctattccggattcttcctgacactccacaggagccatttgctctttgggagattttaaataaaaattctgacccattggttggggttattttagacaatggtgggaaaactctaacatatttcaactatgaccagagtggggattttcaaactgttactttcgaaggacctgaaattaggaaaattttttatggaagctttcacaagctacacattgttgtcagtgagactttggtcaaagtggttattgactgcaagcaagtgggtgagaaggcaatgaacgcatcagctaatatcacgtcagatggtgtagaagtgctagggaaaatggttcgatcaagaggaccaggtggaaactctgcaccgttccagttacagatgtttgatattgtttgctccacatcatgggccaatacagacaaatgctgtgaacttccaggcctgagagatgatgagtcttgcccagaccttccccattcctgctcctgttctgaaaccaatgaagtggctctgggaccagcgggcccaccaggtggtccaggactccgaggaccaaagggccagcaaggtgaaccgggtccaaagggaccagatggccctcggggtgaaattggtctgccaggacctcagggtccacctggacctcaaggaccaagtggtctgtccattcaaggaatgcccggaatgccaggagaaaaaggagagaaaggagatactggccttccaggtccacagggtatcccaggaggcgttggttcaccaggacgtgatggctcaccaggccagaggggccttccgggaaaggatggatcctcgggacctccaggaccaccagggccaataggcattcctggcacccctggagtcccagggatcacaggaagcatgggaccgcaaggcgccctgggaccacctggtgtccctggagcaaagggggaacgaggagagcggggtgacctgcagtctcaagccatggtgagatcagtggcgcgtcaagtatgcgaacagctcatccagagtcacatggccaggtacactgccatcctcaaccagattcccagccactcctcatccatccggactgtccaagggcctcctggggagcctgggaggccaggctcacctggagcccctggtgaacaaggacccccaggcacaccaggcttccccggaaatgcaggcgtgccagggaccccaggagaacgaggtctaactggtatcaaaggagaaaaaggaaatccaggcgttggaacccaaggtccaagaggcccccctggaccagcaggaccttcaggggagagtcggcctggcagccctgggccccctggctctcctggaccaagaggcccaccaggtcatctgggggttcctggaccccaaggtccttctggccagcctggatattgtgacccctcatcatgttctgcctatggtgtgagagctccccatccagatcagccagagttcacccctgtccaagatgagctggaagccatggaactgtggggccctggagtctgatagcctcaggagaaatttgaagaccaactgcaagaactcttaaggaatcttgtttgagaaaatgttgttatgtggtttgtatgctacttttggggggcagggctcatttcagcagcctaaatctcctccttggataatgttaatattattattattattaacaaaaaatatatatttttaaaaagttcccttaatctatgacatggtagcaatgatttccctttggtgtcttaatggcatgtcagataatttgtttttccagagaagagagctcaaagaggaattgggaaaaataaattgaactctggaatcttctctctcaagtcctaaaatgaacaaacagatatgattgtgtttgagggaaatatgtccctagcaggaaaagaattcaaagaggttcaaagaatatgtcacttactcctacttgctgtaggaataaccttgctgataagaaaaaaagggacaatattggagaaactacctcttgtttaattgatctgtccaactctgagatcacttggtaactggtttcatgtgtatccaaaaatcagcatttggatttaagctttctgaatttggtagtttaagaaacagatttagtttttcagtggttttaactcatgtgaaataatgattttccaccagctctgatgcaaagagatataattttaatgaacgatttatccagcagtgtgttccaggggttgcctctccttatctacggggattactttgtacatgcagataagttttcgcaaacctatttccattttcttttgtaagcaaataaaactttaaaacaatgtatgtggattctttttcctgcatttctaagtatcaccttaagcttttgtagtcttaactgagtgtccaccagaaagacaacagttgtcttcctttaggtaagcattcaaactttcattcattcgtttactcactcactcattcattcattctgagtgcagtagaaaacagaagaagcagttaacttgggactaagagattagcgacattttattgttcatttataatctagcaggcagcaaagaccctgcaaatgcatgacctctgctaaataaatgtttatcaatagttgactgaggagcccacctatcttctgatattgaggaaagcctaaaaacccctagaaggcagagcagaaatgaggttgaatctaatagactctaacccttaaaccatactttgtcttttgctcacaaaggaaaaatctaggtatttgagaaagatttgaattctattatgtgctagttgaaatagaaacaaaagagaaccataaatttaatacgtgctccttctctgtaacatctccctagtaacagctaactttagaaagtagggatgggatcatttacaactagaagctggattctttctggatcaggaaaaggctaacacgaaggatggtgtctgtctgatcaccaggttctctttctgtccttctcataatctcctgatctttggagatgaaagatctcctttcatcttcatctgaaggattcttcagatgattcatcttcagacttcatctgaaggattcaaacaatctacttgtgtgcctttggtggggtggggcaggggcggggggcggttctaaacaaatcagtttttttggtgtctttgcagggaatgaaagaagataatgagcagataatcagcagccatttcctttcagttatggtatatgattctgcctgagaaagcaggatttatgggaaggaaaacttgtctaaggctcatcaagatggcctgacccagagtcacctaagagaactcttccaacttaaatgactagggtgtgtaatcagttgcttcttattctgtgtctcagatttcctagtccatgacatttaatagtgagtatagagtaggatattctatacattttagtatttggcccttggaaacaaagttaaataccatgtcactcagaagactctcaaagtttgtgtataaatggcgaagtatacactatgagagattctaatccattcacatcattcttgagttgtgcaaatacacttggctttgatttcacttggtgatctaaatttgtttatttaagctgcaagaaagttacattaatttggaatgtgtcatcacttggacccagtatatcagatttttattgagtaaaatgttaaaaataataagtgtaactcagattctggatgttcgagtttacaatacattgcctgtaataaaagctgattctgaagtgcatttttcttgacttactttggcagaaatatacttatatcttaatttatagtttgtaagtttatactgttttctaaaagtaataaatcatttcatgaaaaatacaaaaaaaaaaaaaaaa

SEQ ID NO: 93 - DNA, 10527 bp, Artificial Sequence
  LOC285556
tttctgtgtggaggtggcattcatgttgaaaggggatggttgatggtgttatttttgttccctgcaaatgtggttgtttaaaatagtgctttattcaatcggcataagtgacacatagactatgtatagtggtggaactgggcctggcaggtgacaagggtcagatctcaccaaaatcaagcatcatggttctccaccgatagtacccaaggaatcagctctgaggatggccagcacagacccccatcttaagttgactggcaaatttgcttgcacaactaccaaattgtctgaaatggaggtacctcagagccagtgaacggggattttggcttcgtttccatggggcatgccagtgggtcacatttcctctctgaatctccctccaagccgcactgtactcttgaagggaaagggacaaggcttcacaagaaacagcacatgctttcctttcatttctggaagtcccggggtcaacctacagatgctgcttcttccgtggccgatggcattcagactcctcgctgctgccgacagtgccaggcaaacaactggacaggacagctcagctacagaacactggccacagtctcggccggagcagcagccccccagccacagaccacctccaccgcctcatccaggagccttcccacctccctcaggcttgctgcggccccgccacaggggctgaagaactgggaggtggtggcagcagtggcagcagtgcctacagccttggggccagtccagatacgtgggaccctgcttcgggcaactctgcagcccctccggggccagagacggacccaagacttccccagcgatcaccattgtctcttcctgtcgctgaaacctgggcaagggctcataatggaagctgcccctcctgagctgaattcgaaagcaagacaggcggaggtgggggacggggtgagcagtgctcaagacagccaggagctcaagcagcagctgtggccacttcccaagccttcagcctcctcccagcgagaagcgaaatatgtggacatgtgtgcttcagctgaagtccagagggagagtccccagaccatgaaacttaccctggggcactgccctgggggtcagagggcctctaggagcccaaaggagaaagcccaagatgaacccagcagcaagactccaagcccccagaacaatcctgcctcctcccaactctctagatcccagcactctgcctctgaagagggtggcaatttctcatcttcctcatcctcctccccgatgaacaaagcagaagaggatggcctttccaaaatggaggactccaccacatccacaggggctctggccacctcctcttcatccttaggcttcgagagtgagagtggtgaaagtgaaggttgccaggccgtgggaggagaaggagagaaaatatcaggaggacggggaggaggaaaaggaggagggggaggaggggcaggagatggaacagagtgcagggacattattgccaagtcccagggcagcagggacccccccaaagtcgaagaggctcactacatcaccacccatgagatccagctgagtgaggtggaacaggacatggatttcgacgtgggactggcctcccgctgggatttcgaggacaacaacgtgatctactcgttcgtggattatgcttcctttggtggcagcgacgagaccccaggggacatcaccagtctgaccgaagaggacgacgacaacagctgctacctcagcaccactcccagcaccaacaccacccggacgcccagccctacaagcagcgacctggcccgccccaatgcaggccgcagtggccgcgacaccagcagcaccgaagtgggcagtggcccctctgacagtggccccactcccccacccactgggcctggcactgcccccctgactgagcccttgcctgagaccccggaggcagcttcaggggcagcagccgccgccgcaagcagctgtgggagtgcagcaagccagatcctcctatcaatcaaaccggcttcccgggctataaatgagcctagcaacgtgcgcgcaaagcaaaacattatttatgctgccaagcatgaaggcgacatgagcctccgcgtctctacagctgctgaacacaattcaagttcgctgaagcaaaacccggctgcagcagtggctcaggaccatgcaaagaaattcattgctgtacctgctcgcctgcaaaccaggtgcggggccatccgggcgaaggagctggtggactactccagcggagcctccagtgccgtgagcgaactggacgatgcggacaaagaggtgcgtaacctgacctcccgggccttccggagcctggcttacccctactttgaggctctgaacatcagctcccgggagtcctccaccacgctctccgaagtgggctttgggcgctggtcaactttcctggacttaaaatgtgggggtgttggggccagggtggagcagagcctcctcaggagcagcgcggcctctgtggctgcaggtctgaggaagggcagtggggcccgggccactgccgaccagctctacatccagtccaagaagtctcagaccaaggccttggagttcgtggtcagcaaagtcgagggggaaatcaaacatgtggagacgcccctgtgtttccagaagcaggtccagacgggctcccgcgtcgtcacccttttggagcccctgaatgtacgcagtgagagcaaagccagctcggcccctgggcccggcagggccaccaaaggccccggcaagggtcccgggtcggcatacacggacgacggctccgagacctccgagggcagcaagcccacctcccgcgccgatggcccccagaagtccaagttcgcctccagtctgctcaaaaatgtcatttccaagaagatgcagcgggaacacgagttcaaaatggagaggggagaagtcatggatacatcccaccacctctcaggcacctccaaggagacggagggcgcccgcgggagcgagaggcagcgagagaggggcctgcagaggcagagctctcgtcactccgaggccggctccgagtacacagtggtcagcatgtccgacgcgggcggggaggggtccgtggcgggctccaaatctccagtcttcaaagccagtactcctcgcgagcgcaacgcaggccctggccggaatttcaccgatggacacacagaagtgtgtgaaattaaaaagagtgcctcagagaccgtcaagggcatcttcctccgtagtcagaacagtgcgttccggtcatggaaggagaaagaggccgagaagagggaggaacaagcccctatagggaagctgaagctgcccaaaggaggcgactggcgggctgatctcggggagatttctgccagcaagaacaccatcatgtctcgcctctttgtccccaacatccagcagacacccaaggacaagcagccgaggaagcaggccaccaagtaccctgctgctcaggccacctccacagcggtgatcagacccaaggctcccgaaatcaagatccggctggggagtgtgcagcagccgagctcagacttcaacattgccaagttgctcacgcccaagctggccggtggcagcgcctctaacctgttcaagaccatcgaggacaacagcagggcacagcagaaactcttccgcggggacaacctagaaaaagtgccccatttccaggtgagagacatcagagacaagtccaaggctcaaggccccctccaccaggtgagagatgtcaggaaactaattaaagggtcaggggatagtagtgacaagggcagtgttaccccagagcaggggctgactggacccaaacccaggcagctgtctgcagcagctggcggatctggatccctgtcccccatggtgattacatgccaggctgtagtgaaccagagggaagacagcatggaccgagagcccagggaaagcatgggcaaagggggcggcagcagagtcttgaattcttcctccccagaagggacagtcttggttcacagggcatctggcaggctgcctgtggctaccattgcccccaataagcccgagcagggctcatacctgcctgtgctcaagattgtctccaaggcttccacccagaagaccccagagaagctcaaggaggaggaggtcaaggaggaagggaaagccacgaagccagcccggaatgccctggagaagctgactgcagccgtgaggtccatggaagagctgtacagcttcaacaggaacgagtggaagcgcaaaagcgaccccttgcctatgatgatggacagccacgtgctgtcgctcattgccagtgaggagagggaaggggtagtggttgctgatggagaccacgacaagctgtccaaacggctgggtgaggtggaagagcggggcacaggaaacaaagctggtgtggtcctgcgaggggcccccatagaacgtctgcagcggagaaactccaaccccagcgctgagagtgtgtctgccagggcagcggcctttgagaacctggccagggaaagaccccgatctctctatattcccccagtccacaaggatgtagagagaacccaacccctgcagcccctcccaccactccccagcaaccggaacgtgttcacagtgagtgccagcagcatccagaaaactgggggtgtcgctggcaagttcccacaagggccttctccggagagtccttcagcagctaagggcatcaagtcgcagggactccggtccctcaagatctctccagccacccgggcacctcctgatgaggtgaccaacaggaaaagtggcagcaatttggagaagagcaacagtgactgtgagaattacctgaccatccctcttaaaggaagctctgctgcaggggagcttcttagcaggcctggggcttccagggaggggccccccaactcctcagctgccactctctgtagtttacccccgctgagtgcccgcagtcaggtccccagtagctccaaaggctctcaggttagtggaaccagccgaccagcttggcgtaccaaacctgacaacccccgggagacagtagctgcccccccagggccacagagccccgagcatccccccaccaccatctaccaccagccgccgctgcccttcaccctacagggggcccagcctcaggtcctctgcttctccccacccagcatgcctgccccagcacctgcagcctcagctcccgtccccacagaccccttccagcaggcacagcctcaacagacccagcgtaagatgctcctggatgtgacaacaggccagtactatctggtggacacaccagtacagcccatgacccggagactgtttgaccctgagacagggcagtatgtggatgtgcccatgacctcccagcagcaggctgtggctcccatgtccatctctgtgcctcccttggccctgagtcctggggcttatggacccacctacatgatttaccctgggtttctgcctaccgtgctgcccaccaatgctctgcagcccacaccaattgctcgcgctccaagaggaagtgagctctccccattggtggcagaaccttccagcaaagaggcagctgcaacgttcaccgaggccccatacttcatggcttctggtcagtctccggcctcctcaacctcctcagccccagcagccacatcccagctcctaggggccaaggcctttgcccagctgcatggcaagcctgtcatcagcattacttcgcagcccctggggccacggatcattgctcccccttcctttgatggcaccaccatgagctttgtggtagaacacagatgatgagcagccaccaggaagcggaatgaaaaactgctggagcaagacaaaaagatggactattcttctttaatctggaatttgcattgtaatagcactaagaattatttcatctgaaaaacttcttccacatgtgttattcttaatttttgcttcttataagctaagtgtgtaagtttctatatttttctgaacaatcctcttaaggcagtttttattttaattttattaagttgattgaatggttgcattttttccctttatgactatttctttttatacttcaacacaggatataagctttctattcacctccttcccccctgtacttgtgactagacaaacaattcctttgttcccattgttcagtcaaaacataccacagaatgggattgattctgttgtaaaccaagctagtaaatgagtaatttggatcacgaatctccttatagtttcttggaatatatcaagactagctggctgagttgtaatacgtatttaagttttcactatgatggtctgctctttgaatcatatatcagccaaacctacccattctcttggttatgctctatatgttcttttattaggtttggcatgatttcaaatgtgattgtgaaaaatggtggttgtaatgtttgtgctttattttatttttcccatttgtacaatgccacgacactatttgttgccttaaaatagaatggcttgaaatactggaaagccaatgattgcatctaaaattaagtacttagtctcagaaaggtataaaatatctattttcctttaagaatccaattatttttgtgggtgcataacatttttcttttcttcaataattccctccatagttgcatactcgtgtctctcatggattgtttagagtctaaagagtgacccatttggggcagtagagtagaatatggcactaattcagtggctctgattcactccagccctagcctcgctatcccaataacagtaacctagagttacagcacttgctccttatgaggatgaggcaggtttgaagagatgtcaagaatccaaatcacagaatcttttattgacatttagtactgtctcagttgtaacccaattctgaaggctatttgagtgagtgttcacagggagtcttgaagactggaagacttgattgaacagataaatatttagcttgtcataataagtgtatcgatatatacttggcaaatgttacattgaaatattacttaattactttttaaaggaataatttgaaggttttcccaggatttttttttaagaatctccttttatttaccaatttgtttaaagataaagcattctggtaattttttaaacaccctaatattattttaaacctcagcaatatttgatttctgcttaaattttcttcataagccacagaattttatgctactcatgacaaaaagtgtgagtaaaaaactaggagactgagttttgtatgatttatataatctttttactttgtagttatgcttcccatctcagactcttaaaaaagacttaatttcactttcagggccttcctttaagggatcttactctgaaaaaaagttctcttgggtatagggaaaggtttgaggcgggaatagtcagctctgatcacgattcaattgcttgttgtgctgatgagctatgaaatgaagctatagactttatgagacatgaaatatgaaacatagtctctgtgtataaaaaagatgcccttgtgccaaattcaagaaaaagatatttctttatcatagaggtcttcttacccaggcacatcaatcaattccccccagaacttaaagtaagttttatccactggggaacaaatcttatggcatcagagcttcctcgttttcaggagagattggctgggtataaggtaacttaatattgacccaagaaagtagaatccctttcagaaatcttacacttattttactgaaagcagcaccaagaaacctccagtatttgaatacacctggtgaaacctatataggatttgggtggatagtaccaaaattgttaagactggtttaaagccaaatgcgactttcaggaaaaaccagtggccatgttgagtagtgactgctcaccaactcttccaaaagagagacaactccttctctagaaaatgtggtagagttgagggcttgggacccctaatctatgtatcagtgtttctcaccagcagatttgagttttaaattctcacactgaggtaaattaggacacaaactaaggaaagaaagaaaaagcttttcatttgtttgttctatacaagaggcttcaccttttaggaagttgccaaggacacagtgatgtccaagtggctaaaaacgcaacttttaaataatgttctattaatatcatgtcatctatcgataattttatggttctctatttcaccaaatcatacaaagctgctaggccattcactacctccagtgatagggaaaaaatattttcacgggcatgaggtaaatctcaatcttgatttttattgttttgtcatttcttgaggttgcatgaatatttgaatgaagtgatatacccttccttttatagctcaaggggaatcaaacaagagcctatgaagccttctgacccataaaactattaccctaataatgtccctttagttactgaacttcccttttattttttattactataaaaccattagtaaaacatttcctaaatagtgccttgaacttgaatctaatcagaattgcagagtctggcttttataatatcctcttagggttatatgtgtggcttagttttccagaagatccactttttacttgttgataaaatggtcatatttgaaatatgtcccatttcaatcatttctggaaaactgaacacatgtgtaaccgtataaaaatttaattcgccagaatgtatgtttttaaaaagtactcaatgaagttgccctcaggattaagtgaaggcccagatatgtaggtaatgacatagcagagaggctctctatatgtccatttatcagggagtaaataagctaaagcaaatcacactttatatctttataacaaatctcaactattgacatgcatttctaatacatccttatgtcactggaaatatctggtgatataaattcctttttcttattttcaaatttgacattatcatccttgcctcttaaaaagatagattttaattgttttcatacttcatagaaatcaaagtctgtgtttgctacaaattgaatgctcacgttacctgaaataatactttggactgcaggacaggacagtattgattcctaagtagattgactataatctcatgataagtatgtatatgtgcatgggaaaacaacattcaataatagtctttgtgtttaaaactatcatggtatacattttcttatgtggtgcttgaggagtttcattctacagtttacaaggtgtaggtttgcaccccaaattctcagggtatgctatttcacccaaatacttgaaagaaaaaggtgccctgtattttatcagtactgttgagggggaaattttttgtgtaagtttgtttgataaaactgcttataaaaatcaaattcacaaaatatgttaggctttcacataatttctaaggagatatatgtagaaataagatatatattatcaagagactgcttatatattcttaactagcttctgggtcctaagtagacctcacaggtgcataaaatcattaataaagcatgtagcacttgctaattggtgccttaagcttgaatctaatcagaattgcagactctggtcctctgggaaaaaaacatgtccgtctgtggcacgtgtgagtactaggcccaggggaagagtctgaaaattgaattcttttgtgtgtcctgtgtctcagaagagaactgaatgttcagagcagcgtttgtaagctattaacattcagtatttcgtgttgcaactagaacacattattagatttattcctgtttaattcataatggtgcagaataaaacacacacatctgatttgatttctttttctttttttaagtttcataattgctttttatggctagtgttaatggcaaaaagtcctttccagggctccctgaataatctaccatacctgtatccatagcaggtgatgcttttttttatccccactttgaagacgtgtgtttctgtatttacacataaatcatactattgtatattaaagacagcagtggttgaaaagaatgtgaacactgtagaagttatgttggaaaaaaggagagtaaattgtgtgattaatggggaaggatattggataatgttataccccggactatgaaaaaagctggtggtaaatgggaagaatgtgaaattttaaactgctctcaacgtaggaatcttggtggaaaagttcctacctgaggtctgatatgattcaattatagaatgcaatgagcttggccaaggggactttgaatccagccaaggaaactttgaatctcgacagctctgagaatcacattttcagtgcattgaatatggagtaaactatttagacaaggattctgtgagactaggctacttacctttaattgccagcatttgtaaatgattgtgcaatcttgtgtaatggtcttttattttgactgttttggaaaaaaaatgttttattgtttttttttcccagtaaaaattacttcaaagaaaa

SEQ ID NO: 94 - DNA, 2760 bp, Artificial Sequence
  ZNF467
gagctcccacttccacacctactccaggctcggagccttaggaccatcacctgcccacctaagcccacggtgctccctcctgggaccccactcctgaaaccccctgcccctgcctcccccagcccggtgcgccggggctctccgcccgctccctcggtccctcctcccttgcaggcgccgtttcccggcttcgactccccgcgcgtctatccctctcctccccgcgaagtttcggggctgtcagtctgtcagtctttcaggccgtcagcacccgagctgcaggcggcgagcgccattgtgagcagagccggcggggcaggaggcccgggcgcctgggtccccgcggcgcgggcggagcggccggccagccaggttctgtggcctgatccccaggaggagctactctgggttaccatgagagagaccttggaggccctcagctccctgggattctctgtgggacagccagagatggccccccaaagtgagcccagggaaggatcccataatgcccaggagcagatgtcctcttctagggaagagagagcactgggggtgtgctcagggcacgaggcccctacaccggaggaaggtgcccacacagaacaagccgaggctccctgcagaggccaggcgtgctcagcacagaaggctcagcctgtgggtacctgcccaggagaggagtggatgattcggaaggtgaaggtggaggacgaagatcaggaggcagaagaggaggtcgaatggccccagcatctatcgttacttcccagcccctttcccgcgcctgacctggggcatctggctgccgcgtacaaactggagccaggggccccgggggcactgagtgggctcgcgctgtctgggtggggtccgatgccggagaagccctacggctgcggggagtgtgagcggcgcttccgggaccagctgacgttgcgactgcaccagcggctgcaccggggcgagggcccctgcgcctgcccggactgcggccgcagcttcacgcagcgcgcccacatgctactgcatcagcgcagccaccgcggcgagcggcctttcccgtgctccgagtgcgacaagcgcttcagcaagaaggcccatctgacccgccacctgcgcacgcacacgggcgagcggccctacccgtgcgcggagtgcggcaagcgcttcagccagaagatccacctgggctcgcaccaaaagacccacaccggcgagcggcccttcccctgcacggaatgcgagaagcgctttcgcaagaagacgcacttgattcggcaccagcgcatccatacgggcgagaggccctaccagtgcgcacagtgcgcacgcagcttcacgcacaagcagcacttggtgcggcaccaaagggtgcaccagacggccggcccggccaggccctctcccgactcgtccgcttctcctcattccactgccccgtccccgaccccatcctttcccgggccaaagcctttcgcgtgctccgactgcggcttgagcttcggctggaaaaagaacctcgccacgcaccagtgtctgcaccgcagcgagggtcgcccctttgggtgcgatgagtgcgcactgggcgccaccgtggatgcccccgccgccaagcccctggccagcgcgcctggcggaccgggctgcggcccaggatccgatcccgtggtgccccagcgcgccccctcgggcgagcggtccttcttctgcccggactgcgggcgcggcttctcccatgggcagcacctggcgcggcacccgcgcgtgcacacgggcgaacggcccttcgcctgcacgcagtgtgaccgccgcttcggctcgcggcctaatctggtcgcccactccagggcccacagcggcgccaggcctttcgcctgcgctcagtgcggccgccgcttcagccgcaagtcgcacctgggccgccaccaggcggtgcacactggcagccgcccccacgcctgcgccgtctgcgcccgcagcttcagctccaaaaccaacctagtccgccaccaggcgatccacacaggctcccgccccttctcctgcccgcagtgcggaaagagcttcagccgcaagacccacctggtgcggcaccagctcattcacggcgaagccgcccacgcggccccggacgccgcccttgcggccccagcctggtccgctccccccgaggtggcgccgcccccgctcttcttctgagcctagttctcacgaggaccctttcttgcccacagtttcgagaggcccgtgccatgagaccgcctggggtgagcaaggcgacctgggctgctgcccgaaggtttggccgccgcgggacacctgtttccttcccgcagtgtctgcgtccgcacagcatacccagctcggacctcctaggacagagactcagcgaacccttgctgggaaccgctgagctgaagttcttggaaggctcccacccaggtgccccgttggaaagcagatatttcccggacccagcgcggcctcaaccagggcaggaaagagtggttatttatgtacttaaagtttcattaaagttaaaatcggaaagttctggggctgctaaatgaattgggggagggaacacctgactctccttagccactgtcccacctccatccacacacagaccacccccctccacttccccttctgtcctgggtgagttacatttagccagctgctgttaattggttctcccaaataaaaatgtaatatatttattcactaaaaaaaaaaaaaaaaaaaaaaaaaaaa

SEQ ID NO: 95 - DNA, 2359 bp, Artificial Sequence
  LMOD2
gcattgtcacagccctgtatcaccactcttaaaaggctcccacagccactcctagcaccagttgttgaccagcctgccacttgcctccctgcctgcttctggccgccttgaatgcctggtccttcaagctccttctgggtctgacaaagcagggaccatgtctacctttggctaccgaagaggactcagtaaatacgaatccatcgacgaggatgaactcctcgcctccctgtcagccgaggagctgaaggagctagagagagagttggaagacattgaacctgaccgcaaccttcccgtggggctaaggcaaaagagcctgacagagaaaacccccacagggacattcagcagagaggcactgatggcctattgggaaaaggagtcccaaaaactcttggagaaggagaggctgggggaatgtggaaaggttgcagaagacaaagaggaaagtgaagaagagcttatctttactgaaagtaacagtgaggtttctgaggaagtgtatacagaggaggaggaggaggagtcccaggaggaagaggaggaagaagacagtgacgaagaggaaagaacaattgaaactgcaaaagggattaatggaactgtaaattatgatagtgtcaattctgacaactctaagccaaagatatttaaaagtcaaatagagaacataaatttgaccaatggcagcaatgggaggaacacagagtccccagctgccattcacccttgtggaaatcctacagtgattgaggacgctttggacaagattaaaagcaatgaccctgacaccacagaagtcaatttgaacaacattgagaacatcacaacacagacccttacccgctttgctgaagccctcaaggacaacactgtggtgaagacgttcagtctggccaacacgcatgccgacgacagtgcagccatggccattgcagagatgctcaaagtcaatgagcacatcaccaacgtaaacgtcgagtccaacttcataacgggaaaggggatcctggccatcatgagagctctccagcacaacacggtgctcacggagctgcgtttccataaccagaggcacatcatgggcagccaggtggaaatggagattgtcaagctgctgaaggagaacacgacgctgctgaggctgggataccattttgaactcccaggaccaagaatgagcatgacgagcattttgacaagaaatatggataaacagaggcaaaaacgtttgcaggagcaaaaacagcaggagggatacgatggaggacccaatcttaggaccaaagtctggcaaagaggaacacctagctcttcaccttatgtatctcccaggcactcaccctggtcatccccaaaactccccaaaaaagtccagactgtgaggagccgtcctctgtctcctgtggccacacctcctcctcctccccctcctcctcctcctccccctccttcttcccaaaggctgccaccacctcctcctcctccccctcctccactcccagagaaaaagctcattaccagaaacattgcagaagtcatcaaacaacaggagagtgcccaacgggcattacaaaatggacaaaaaaagaaaaaagggaaaaaggtcaagaaacagccaaacagtattctaaaggaaataaaaaattctctgaggtcagtgcaagagaagaaaatggaagacagttcccgaccttctaccccacagagatcagctcatgagaatctcatggaagcaattcggggaagcagcataaaacagctaaagcgggtggaagttccagaagccctgcgataaaaacatgatctttagaagaggatgcagaactgttcagtggtattacatgaaatgcattgtgagatgtttctaaaataccttcttcaattcaaaatgatccctgactttaaaaataatctcacccattaattccaaagagaatcttaagaaacaatcagcatgtttcttctgtaaatatgaaaataaatttcttttttatgtcgtgagatttgtattggcaagaagcagttaatttaaagatgctcttcctatctgtggatgtgttggtaactccgagttgtaatgagttcatgaaatgtgctgttatttttgtaatctcaataaatgtggattgaagttttttccctttttttaaagccaaactaatatttttctgtgacttgatacatctgtcagatttttgtaatctcgataaatgtgtattgaagttttttccctttttttaaaaagccaaactaatatttttctgtgagttaatacatctgtcaggtgtgtatgtaacattactggacattaaaaaaaaatattacattctcacccaaaaaaaaaaaaaaaaaa

SEQ ID NO: 96 - DNA, 1206 bp, Artificial Sequence
  TCEAL7
aggagctgacgtgaaccgaagtccttatattcccgggcttctttctcctctgggtaccagctccttactgccctgcagacaagcgtgccgtgcgtgcttgtggccaagggaaggaagagctggttgatccacagatagctccttcctccccgccccttcctttttgtttggaggtcccaggatctgtgttcacagacatctgggggaagaaaaggagcaggaaactaccccgcacagagttaagcaggaaacaacaacaacatcatgcaaaaaccctgcaaagaaaacgaaggaaagccaaagtgcagcgtgccaaagagggaggaaaaacgcccgtatggagaatttgaacgccagcaaacagaagggaattttagacagaggctgcttcagtctctcgaagaatttaaagaggacatagactataggcattttaaagatgaagaaatgacaagggagggagatgagatggaaaggtgtttggaagagataaggggtctgagaaagaaatttagggctctgcattctaaccataggcattctcgggaccgtccttatcccatttaattaatttctctgacaattcaattattttctgttattaatgttgccactgctttctgtttgtctgcactttcttgataaatatttgctatcgttttactccagtcattcgatgttgctgagatttacatatgactcttgtcaacatctcatcttttgacccaatcttattcatttaataagaggtctcattcatttgcatggaaaaatgctcattgtatattgcaaagtgaaaataacgagttgcaaaacagtgtatacatatatgtgtgtatatatgtacactttatttgtacatttctatgtgacataatgcaaaggaaagtgtctgattttattatacaccaaaggttaacagtgaatctctgtgtgatctctttttttttctttttgcctatctgcatcttctcacttgccaaaaaatgaatatatgtttatgtgtgtatattacttgtgtcacaaaaaaccctaaagtagacagtaaaagaacttgtcaatcgcctttggaaggcaatgaaacacttaataaactctcaataacagaagcgtaaaaatgaaatgtaaacctccaattacctctggatctcttagccagagtaataaactggtaattattacagataaaaaaaaaaaaaaaaaaaa

SEQ ID NO: 97 - DNA, 7692 bp, Artificial Sequence
  PRPF40A
gcgacgccgagtgaggctgaggctgggggcgaatcgccgcagagctgcgtgtcggcggcgcattctgattggacagcggggaagcccgtcagcctgttggccccgctgatcccgccccgtagcgcagggcagcctttaacctttagccccagtgggcgccagccactcagatcgcttcttgttggtatgtgtagcggcagtggccgccggcggagcagtctgagcccgacgatgaggccggggacgggagctgagcgtggaggcctcatgatggggcaccctggcatgcattatgccccaatgggaatgcaccctatgggtcagagagcgaatatgcctcctgtacctcatggaatgatgccgcagatgatgccccctatgggagggccaccaatgggacaaatgcctggaatgatgtcgtcagtaatgcctggaatgatgatgtctcatatgtctcaggcttccatgcagcctgccttaccgccaggagtaaatagtatggatgtagcagcaggtacagcatctggtgcaaaatcaatgtggactgaacataaatcacctgatggaaggacttactactacaacactgaaaccaaacagtctacctgggagaaaccagatgatcttaaaacacctgctgagcaactcttatctaaatgcccctggaaggaatacaaatcagattctggaaagccttactattataattctcaaacaaaagaatctcgctgggccaaacctaaagaacttgaggatcttgaaggataccagaataccattgttgctggaagtcttattacaaaatcaaacctgcatgcaatgatcaaagctgaagaaagcagtaagcaagaagagtgcaccacaacatcaacagccccagtccctacaacagaaattccgaccacaatgagcaccatggctgctgccgaagcagcagctgctgttgttgcagcagcagcagcggcagcagcagcagcagctgcagccaatgctaatgcttccacttctgcttctaatactgtcagtggaactgttccagttgttcctgagcctgaagttacttccattgttgctactgttgtagataatgagaatacagtaactatttcaactgaggaacaagcacaacttactagtacccctgctattcaggatcaaagtgtggaagtatccagtaatactggagaagaaacatctaagcaagaaactgtagctgattttactcccaaaaaagaagaggaggagagccaaccagcaaagaaaacatacacttggaatacaaaggaagaggcaaagcaagcttttaaagaattattgaaagaaaagcgggtaccatcgaatgcttcatgggagcaggctatgaaaatgattattaatgatccacgatacagtgctttggcaaagttaagtgaaaaaaagcaagcctttaatgcctataaagtccagacagaaaaagaagaaaaagaagaagcaagatcaaagtacaaagaggctaaggaatcctttcagcgttttcttgaaaatcatgagaaaatgacttctacaaccagatacaaaaaagcagagcaaatgtttggagagatggaagtttggaatgcaatatcagaacgtgatcgtcttgaaatctatgaagatgttttgttctttctttcaaaaaaagaaaaggaacaagcaaagcagttgcgaaagagaaattgggaagccttaaaaaacatacttgacaacatggctaatgtaacatactctaccacttggtctgaagcccagcagtatctgatggataatccaacttttgcagaagatgaggagttacaaaatatggacaaagaagatgcattaatttgctttgaagaacacattcgggctttagaaaaggaggaagaagaagaaaaacagaagagtttgctgagagaaaggagacgacagcgaaaaaatagggaatctttccagatatttttagatgaattacatgaacatggacaactgcattctatgtcatcttggatggaattgtatccaactattagttctgatattagattcactaatatgcttggtcagcctggatcaactgcacttgatcttttcaagttttatgttgaggatcttaaagcacgttatcatgacgagaagaagataataaaagacattctaaaggataaaggatttgtagttgaagtaaacactacttttgaagattttgtggcgataatcagttcaactaaaagatcaactacattagatgctggaaatatcaaattggctttcaatagtttactagaaaaggcagaagcccgtgaacgtgaaagagaaaaagaagaggctcggaagatgaaacgaaaagaatctgcatttaagagtatgttaaaacaagctgctcctccgatagaattggatgctgtctgggaagatatccgtgagagatttgtaaaagagccagcatttgaggacataactctagaatctgaaagaaaacgaatatttaaagattttatgcatgtgcttgagcatgaatgtcagcatcatcattcaaagaacaagaaacattctaagaaatctaaaaaacatcataggaaacgttcccgctctcgatcggggtcagattcagatgatgatgatagccattcaaagaaaaaaagacagcgatcagagtctcgttctgcttcagaacattcttctagtgcagagtctgagagaagttataaaaagtcaaaaaagcataagaagaaaagtaagaagaggagacataaatctgactctccagaatccgatgctgagcgagagaaggataaaaaagaaaaagatcgggaaagtgaaaaagacagaactagacaaagatcagaatcaaaacacaaatcgcctaagaaaaagactggaaaggattctggtaattgggatacttctggcagcgaactgagtgaaggggaattggaaaagcgcagaagaacccttttggagcaactggatgatgatcaataaattataccaaatatatgtttacagtatgatttaaagtctgattcagaccagggactctattttaagttcaactgaaataacactgggttttaattatatcacaggaaaaaaaaagtgcatttaagtattgttatcgtggactttataaaagcaaaggaaattgaaagtaacttttgattctgtatcaagaatcatattttcatacagtcataactgtctttctgtgaccctttcacagggcactgtaggatggattaaaggtggcaatttactgataactgcagatgtctctactttgttctaaaatctaagtcatgaggtgatttgatttactttatagaagctggattttgaagatctaatgaaaaattttttgataatatagtagtacaaaaaaagcaccagcaactgataaaaattgcttttttgtgcgctacccaactggttaaagccaatgtgatcttttatggtgaaactcctaagaaacaggtggttttgctggaaacttggtagacccttaattatagtggtgctaatgagcactactgtaatataaagccaccattattttttatcaaacatctgaatacattttacaaaggctattgtgagggcattattttgagcatctattttgaggtgatgtttaaaaaaactttaacatcaaatcaaattgtaaattaatttaaatatattgccttaaggacctactaaagaatgtgccaccagactttaagtgatagttgcaatatccttgtctaaaaaaaaaaaaaaagttgacttaaacattttctttaacagttgtcttttttttctaaattcagtctttctcttgcttttttttccctgctattgaggaagtattttgccttccctactcactgagaagtattgacttcgtggtacacattctaaagcatttctgatttgaatatttttgtacatttttatcaattattaaaccttctcttctagtgtgtactagtatttatttctacttaaactgctcagctctaaagaaattgtatgatcactttaaaggtactaaatccctgaaattttgcttcatcttacccacaccgctagtttactttccttttttaatatttaagaatattataaatcagtgcatttgaggtccctagatttgtttttcacctatgaattttttacagactattttagagaggctgtggtttgaagacagaatactctttacatgctaacttttgaaggttggtaatgtaatttatactattttccttcagtgcaggagattttttaagtaaataagtaaattttagcacctattcttcggtattatctgtgttattcttttaatgtgtacacttgaagagatcctatttcaaagttgggattttgaagaacaaaaagtttttttcttacccatcctagtgagttttgaaagtgggcctgaccagaatgtctctttcccattttgccccgtttgaattaaatataatgtctactctttaaaggctgaaggggtgggtgaggggattgtttctcattttgtctcccaagtcatttttctgctgtgaaatatgaccaggcttgtaggaagactcatcttggagaaaatgtgaagtaatcaaattgcttgagattagtctcctattgtatattagagccaaaacacataataactttggcaacagggagttgtctagactcaattttcagaggtcccattgtagtgagttaatattgctaatcatgtcaatcacttgacatggaagtcagtggcaaatctttaaagtatgcatttgatactggcaaatatatactactgatgtttcacaaaagaatcttagaatctgtagaaaacattaattacttccatgaattatttctaaagtataactttaaagttttgatttttctatttaaataaaaagctattgatgtgttttagcatgtcctcaaaatagattcctgtatttcttacagagataatcttactataaccgcaaatccctacaacacagtataaagtttccctgtagttcacccatgaaaattatttgacttaaaaacaaccatagtagtaagccaattgcaattcaaaatgcaacatccttgccataaaagatgtaacttaagtgactgtgatcctttgtctacctttcaggatcccatcaaatgggatttagttgctagaaagatacttgacagtctgaaggcacaggtgataagattttgttctctgtgaatatttttaaactaataggttatgtttttaaatcttcaatttggtaaaaaactgaaacgtcttggaatattggttctattagagttaaatatggtaaaacaggaaagcgtgtttattttcagataaggggaatttatacttttcattaaagtcttggagtcttaggaaaatgttgagggtttgtcttcccccagtgtcattaatactaatgaactattagatcaaattcacttatacatttaatatcatagttattcaaaatcaggactttaaatatttttttctcccagttcatatttctttgtgcgaaaattgaatttgtatgaaaagttagataattaagctaatcaagtatgaagtatacactcttcctaagtgaatttaaataatgtaatgcttttaaataaaagcagtggtcccaccacatttttttcagcatagtagctggcattttgttatcattagccagagtagcttcagcatataagttattgatgttttccaacttcaaaagtgcattttatgcctcccagtaaatttgataatgatttgtcacagctttgtcatcttttgacttttgcttatgggcctcacttcgtacaactataacatgaaaaaggattgtcctaaagtaagggaatcagttaatggtaggatgaagaaactgtaaaaactcctagaaaaaaacctgtgtgcatttttctggaaagttttcaaactgtgtaattcagttttcattcaattatataatttggttatatgctttaaaaaacatttgtctaaatgttcccggttttcttctggtcttagagtcagctgagtgctggctatgcagccactcgtatttttgcatccagaaaggagtaactccctttatatgaagatttttttttttaagcttagatgctatgtaagagaaaactatttgtaatcacatagtacccagggaggagtgatgaatgcttttttaaaaaaggatatttaagtatattatgtaatttaaatataaattatcaaactaaaaaacttcagcttttaaaactttctaaacaaaatgaagcaaagtacattaattccttctatcttaaatctgagactttttattttcccttgggtatatatttctctcagtgttaggtagatgttaattcaaccatcctacattctctatataaaattacactcattttacatgaaagcaaaataatgtcgttactttcatggaactgtgttctaacaggcttataatctcattctgtgcttctggtaatggcgtataccagtctgatgattcttaccatccttattcttacattactcttccaattgttttgattttaactggtggtcatgtaagttcctcggtggcagggatttatctggttcatttactgttatatatccttgtggaataggacagtgcctggcatataataggcacttttggaatgaatgtaaaatactagttgaaatatgtattcatctggcatccatggtacccatcatctgtattaaagggcttaaaaaagcatcattgcaataaaccatactaacccaccactaaagtcacagtcataattgaagtgcacccaaaataaggtccagtgactgtaccttagcttttacttcagacatgtccaaaacttgtgagaacatacaatttaaagttgaaaactcatcattttgggctatttttgaatagggctgaaatatggtgacatgtcaggcactcagttttttggagctgtcttaaaggtgaggtggaaagtgagagatgattttgctctaattacccacacattctccctaaccctccattttaagacacttagctataatagcttaagactatcaaaactgcttttgtgattctcagtaggatctagttcaaagccatctcagtgctagtgattggtaattgttaatttgatggtaattaccctacttgtaaagttgacattcatactggctaatcctccctgcccctagtcgtggacaatgaaacagtgagtggctggtgaattagatcagattcaaactaagccattccttgatgctattcttcactgctgttccttagggtatctaaatgtgttatttataaacatttttgggggctcctgcctgcaaacttcggtaggtgttggtcttccccacctctacaactgagccaaggacttgttctgaaaggtgagtaataaataagggaacaaggtttctattttctgtgtttgtaattaccagattttcacctctgtttatatattattctgatgtaaaagaacctcatagttatataaaattagaccttttgtaaataaatataatttattagaaaaaatggtatcttttactaaattggatttgtgtcagttttttcctttaagcaccactcaggcagcaagctctatgctgtgagagttgctggaggcccacgttatgttttctcagtgtaattcctctttttcttgataaaaaga

SEQ ID NO: 98 - DNA, 1008 bp, Artificial Sequence
  ZFAS1
cgggggcccagggtggagagcacgagggcctggcccaggcacggccggcgcctccgccctcgaggagggcgtcacctcagctccccccggcggcggagccggcgggctcaggcgggcgcggctgaggggagcggaccgcggggggcgggagatgactgcgcccaaggcctttgcgggcctcagccggccccagaggaaggggaacccgtcgagcggtttggtgcgtgtgaagcgcgacatggcgaggaagcggacaagcccgggtggcccggcgtgtagagggaagggggcggggctagacgcggcctggacaactactagagcgcctcgggctgtgctgctcgagactacatttcccagagcgacgcgcgcggagcgggcgggaaagagagcgtttcgggtccagtgcgcaggtgcgaaagccatctttggttatataagggaggttcaggaagccattcgttctttcgcgtctgcggtgcccggagtgtggtacttctcctagttgcagtcaggcttcatacgctattgtcctgcccgttagagcagccagcgggtacagaatggattttggaagagggagtcaccactggacctccaaggaagccacgtgcagacatctacaaccttcgatctcctgacgagtttattgttggccaaaaccaggctttgattgaaccaggatgaatgcgggtgttggaagtagaatatatatatacatataaaattggttgggagccacgtgtaccagtgtgtgttgatcttggcttgattcagtctgccttgtaacagaaactggcgatggaatatgagaggagccctctggaaagaaaaggacagaccctgtgctttcatgaaagtgaagatctggctgaaccagttccacaaggttactgtatacatagcctgagtttaaaaggctgtgcccacttcaagaatgtcattgttagactttgaaatttctaactgcctacctgcataaagaaaataaaatcttttaaatcaaaa

SEQ ID NO: 99 - DNA, 2917 bp, Artificial Sequence
  FAM192A
accggatttccatcgggctcccggggaggaagagctccgcggattgggttacgtcgccggaagtggggcgggactctattgtggcggtgaggaacaggaagccctgaagggtcaaaagaaatacaaaagcaaaggctattttctttttttttttctttctttcattcattccttcctctgtttctttctttcttcctttcatttttttttcttttttaagagcgagcggctctgcggtggcggtttggggtgggcgccgccgaggtgaggtcgtctcgcctcccgcgcgccggtagattggttgtttcattatggatggaggggatgatggtaaccttattatcaaaaagaggtttgtgtctgaggcagaactagatgaacggcgcaaaaggaggcaagaagaatgggagaaagttcgaaaacctgaagatccagaagaatgtccagaggaggtttatgaccctcgatctctatatgaaaggctacaggaacagaaggacaggaagcagcaggagtacgaggaacagttcaaattcaaaaacatggtaagaggcttagatgaagatgagaccaacttccttgatgaggtttctcgacagcaggaactaatagaaaagcaacgaagagaagaagaactgaaagaactgaaggaatacagaaataacctcaagaaggttggaatttctcaagagaacaagaaggaagtggaaaagaaactgactgtgaagcctatagaaaccaagaacaagttctcccaggcgaagctgttggcaggagctgtgaagcataagagctcagagagtggcaacagtgtgaaaagactgaaaccggaccctgagccagatgacaagaatcaagagccctcatcctgcaagtctctcggaaacacctccctgagtggcccctccatccactgcccctctgctgcagtatgtatcggcatcctcccaggcctgggtgcctactctgggagcagcgactccgagtccagctcagacagcgaaggcaccatcaatgccaccggaaagattgtctcctccatcttccgaaccaacaccttcctcgaggccccctagtttctccgtccctacacagggagctcctccccaagggtagatcggaccgttcatgctgcctataggcattatgtccctcaaaaaaaaactcctttgcctgcatcctgtgtacaacatgacatttttaaccaatccaatctaaaaatgtgccagaatccacctgtggcccgaatcgtgtttggttcctctttctactccactgcagatgaccaaacctgtcccgctgccactttcctcactgatattgggaggagggcaaggcccagccgaagttccactaaaaatgccccaggagaataggcaccggctggcttgccaaagggtttgggttttattgctttctgttttttcttttcccgacagcacaaagaagtaagggcagttattggacaggtgttatttaaacattctattgtaaatgaatgtgttgtttggttctactgcattgtggagcatgcgggggaagagaactgacccaggtagtgaaatggagcccttccctggaactaaccagtccttgatgttgtgtgactaagtaaagatgataaaccccatctgctgggggtgtcacttcacactcggcatgcattgtgaaagctttccatacccttggccattccctctctcctctctctccaaccccatttatgcaggaagggactgctaacaagaacgcttccatctcaaaccttttctctgcctgggaaattattttatgtttgtttttgaaataaaggatttagtttaagattctaaattttagagaaacaaacgtaggccttgtttactaatagccagacatcagaactgcaggtaggtatgttaatgagatgacttatttctggcagctcctggaatcctaatattgtaaatgagtgggacacacttgcatattgtgaccattctattgaggcccttctctgtttaatgcatattatacttgtgcttttaactgtggaatctatttctaacctaaaggtgctgccctagtacttttctttgctgcctctgctgctctttttcctttccaaacagcaactctgaggccatgagcagccaaaaactagaggtactgctccacctcgtctcataaagggaaacgggctcatcccttggattctggaggagggagagggagatggtgtggaggcctcgaggacagagatagacatgagctttgacaacaatctgtaggctctcctgctttagaataagcatgtaccattctttatccattccccttattcctacatcaattgtttttactttcttgggtgtgagactgagtgagacacacacaaaatgtgttgacactgtgatgccggcaggcagagcagctactgactttgaacatgggcagagaggcccctggatctcatccagcccactccttttccccttccagtacagtgacactctggtgcccattggcagatggcgacttccctgcacccataactgatgctttgtgaattcttcctccttttcagaactactctgtgctaattgttctgccagtatgggcgcatcagctccatcctgacaaacaagacatttaggtaaaactttgtaggcaccttctgcttctctgcttcattgttcctgtgatagtcctgttgttattacagcatgtacccaaaacagcctcacattgttacaggaggcaggccaggacatcaaagtcatcatctttatgtggcatgactcttaagaggccattactgtatctcatggcctcttgatgtggaaagaagttgacagagggttgcagggtttaaaaacatccattaacatgaaagctaataaacctgtcagagaacaagaaaaaaaaaaaaaaaaaa

SEQ ID NO: 100 - DNA, 3176 bp, Artificial Sequence
  LINC00461
acaagtaatcctcgtgtgtgacagagagagagagagagagagagagagagagagagagagaaacgagctggcggagaggagcagaaggcaggaggggaaatctggcacaacggctgggagaggaaacttgatgcttctgggccaccatttgccagggcctcgctcgagccggcgcctcggttcctgcccagctggatttggggggcagcattgcctggcgcagggagatcaaatgagactgcaaagaagcataaaatgaatagacaatccaaccaaccaaaggaaattgctttggagatgaggaaacaaactcttatggagacctaagagactgaagacatctggcgtggactactctgatggtaaaattgaaagtacacctaaatttgctttgttacaggattctcttcagaggacaagagaagatgttacattctctgcatgaggacaattctgcagcatcaaaatcgaataatatttgttttctggcagcagaattttgtatcatatttctaaagacagtaagcacttgggtggacgtcaatgaatactaaacactaattgatctgatacagccgtatgcacatacacagatatacatggtggcttgtaatggttgaaaaattacggtttggttttattaaaagatctgtcacttttaggtcagagtgggattttggagggatagtctcccacaatagaaaactaccctgacaacagtggtgttttgaggttgtttgttgtttggcttcttgatgatgcttagctaaggagacacttcctttcagattctgtcttccaaaccccagggctctgttctgggcagttcagcctaatggaattaagcctgacatgtttcaactctatttcttgataaaataaacataaaacaatggtttagatttcgaataaaactcttgaagcatggggtactctaactttccctgttctttacacatctgtaaataaagtgcataaaagaggaacacaacaggataaatcaacataaatttgaaatccactgcagcatattaaatggcgcagtctcagtcaaagagaggctgaccccgcggcttcgtgcagtttgaagctaattgttttcgtcaggatgggaacgtctggaagtccatggctgtatcccaccagtaaggctccagtaactgagccggcccacagagaatgggcccactttgtagcgacacagcgggctcagacaccacctattctgctctccaaactgtcatgcataacaactttattgtgctaaattgaacttgaaagcaaccaaaggctatgagaaggagaggctatgagaaaagcgtgctgtcagcgccggcaaaggctgacctggaaagtaggctcagagacaggggaataaaagaccaggccccatgaacacagcatattgtttcattttaaagtatgattcccataccagagaaagtagcaaatgtgatgtaaatttatttaaatagattcgaccgcttaaaagtttgccagccgctcttatccaactttcccagctctctgattcgttacttacagtgggaatataatgacatatagtcatcattgtaacagcttctttgcaggggcacaatgatgattaatagccagcagcaaattttcacatgggctctgaagcactatggcattaagcagccaaacagtcccaaatcccccttttctgttccgctgaaaagtcccctccttgtaccttccagataggaacaaagcctatcttaattccaatcagcttttcgtcattcaaagggaccttctctttttcataattgattcatgtgcattttttagtgttccactgagctgaagccacttttctcctttcctctgttctgtccccacacccacaccccctttttttgagggggtgaggagtgggaaacatttcaacaacaacaacaacagtaaaaaatggtgtggtagtttcccccgcaaatatttgctaaatagatttctcaattagtattagctttacacttaaaagtcttaaaacaaaaattaactcctggacttcttttttgttggaagtggttttggttataaaaatatgagcttactgaaatagctctggtggcagccccacaatcatgttctgtttcactgggagagtttgagtagctttccttcccaccagagactcacagctggagtgaggatggagtctcttgcttcagacagattctttttcctcctctgtgctggtagccatcaaaaaaagaacaagtgaccaaaatgaaaggcggcaaatgcacacctcctaacccactctgtccttcttaagtatcatttttccccatagtaatcgtacattataattattagcagaagctcctgtgctatttgtggaagtgctctctctcgtctatagttttcacctcctgtgataacgacacaaacgacatcaaccagtgctgtcttggaaaaagatttccatccgcaaattcatttgtgtttctatgacaatatgatggccatagagcacagttttagtagatatactttgcatatttgtttacattccttacaaatctgacctcatttttctatatgagtagggtgaccacacacccctgttttctcaggactagctgtatttatgcctattgtccttacataattattaacagtacttcctttcaccctcaaaagtatcctgatttgaacaatttgaaaaactcatgacgttttgccattaaaatggccccaaatgacttacacaaacccaaagggtgggctgtctcctacccaggtggctggggactgctttataccatcccagtttaggggaaagaatcaaacttggaaaccctgctgccgatgtagcagcaccgacttttgtctcgcccactttgaagaggtcagttgaccctatacagcttctttgatatgtgacagaaaggaggtcatttgctgaaatgaaagacacattacaaaccagattttaagtgtgactctttccttcagctgggtcacagttcttactttgagccagagcaacacactttactggtcagataaaaatactctgccatattttagaataatgacctttcttatgctttggtgtctccaaatggttaaatggagaatatatccaattgacaggaggaattctgttcatcatttttactcttgtgtttatatcttctcat

SEQ ID NO: 101 - DNA, 466 bp, Artificial Sequence
  S100A12
accactgctggctttttgctgtagctccacattcctgtgcattgaggggttaacattaggctgggaagatgacaaaacttgaagagcatctggagggaattgtcaatatcttccaccaatactcagttcggaaggggcattttgacaccctctctaagggtgagctgaagcagctgcttacaaaggagcttgcaaacaccatcaagaatatcaaagataaagctgtcattgatgaaatattccaaggcctggatgctaatcaagatgaacaggtcgactttcaagaattcatatccctggtagccattgcgctgaaggctgcccattaccacacccacaaagagtaggtagctctctgaaggctttttacccagcaatgtcctcaatgagggtcttttctttccctcaccaaaacccagccttgcccgtggggagtaagagttaataaacacactcacgaaaagtt

SEQ ID NO: 102 - DNA, 724 bp, Artificial Sequence
  MRPS28
caaaggtcagaggtaaagaagtcatggcggcgctgtgtcggacccgtgctgtggctgccgagagccattttctgcgagtgtttctcttcttcaggccctttcggggtgtaggcactgagagtggatccgaaagtggtagttccaatgccaaggagcctaagacgcgcgcaggcggtttcgcgagcgcgttggagcggcactcggagcttctacagaaggtggagcccctacagaagggttctccaaaaaatgtggaatcctttgcatctatgctgagacattctcctcttacacagatgggacctgcaaaggataaactggtcattggacggatctttcatattgtggagaatgatctgtacatagattttggtggaaagtttcattgtgtatgtagaagaccagaagtggatggagagaaataccagaaaggaaccagggtccggttgcggctattagatcttgaacttacgtctaggttcctgggagcaacaacagatacaactgtactagaggctaatgcagttctcttgggaatccaggagagtaaagactcaagatcgaaagaagaacatcatgaaaaataaatgaactttgcttagtggattgactcctttgctgaagtcagttattcatcaagaatgcaattagactaattgtgaataaatgattgaatgaagatataataaataaaagctataattataaaaaaaaaaaaaaaaaa

SEQ ID NO: 103 - DNA, 4366 bp, Artificial Sequence
  ITK
tgcattctttgccccaaaactctttcctttggttgtgctaagaggtgatgcccaaggtgcaccacctttcaagaactggatcatgaacaactttatcctcctggaagaacagctcatcaagaaatcccaacaaaagagaagaacttctccctcgaactttaaagtccgcttctttgtgttaaccaaagccagcctggcatactttgaagatcgtcatgggaagaagcgcacgctgaaggggtccattgagctctcccgaatcaaatgtgttgagattgtgaaaagtgacatcagcatcccatgccactataaatacccgtttcaggtggtgcatgacaactacctcctatatgtgtttgctccagatcgtgagagccggcagcgctgggtgctggcccttaaagaagaaacgaggaataataacagtttggtgcctaaatatcatcctaatttctggatggatgggaagtggaggtgctgttctcagctggagaagcttgcaacaggctgtgcccaatatgatccaaccaagaatgcttcaaagaagcctcttcctcctactcctgaagacaacaggcgaccactttgggaacctgaagaaactgtggtcattgccttatatgactaccaaaccaatgatcctcaggaactcgcactgcggcgcaacgaagagtactgcctgctggacagttctgagattcactggtggagagtccaggacaggaatgggcatgaaggatatgtaccaagcagttatctggtggaaaaatctccaaataatctggaaacctatgagtggtacaataagagtatcagccgagacaaagctgaaaaacttcttttggacacaggcaaagaaggagccttcatggtaagggattccaggactgcaggaacatacaccgtgtctgttttcaccaaggctgttgtaagtgagaacaatccctgtataaagcattatcacatcaaggaaacaaatgacaatcctaagcgatactatgtggctgaaaagtatgtgttcgattccatccctcttctcatcaactatcaccaacataatggaggaggcctggtgactcgactccggtatccagtttgttttgggaggcagaaagccccagttacagcagggctgagatacgggaaatgggtgatcgacccctcagagctcacttttgtgcaagagattggcagtgggcaatttgggttggtgcatctgggctactggctcaacaaggacaaggtggctatcaaaaccattcgggaaggggctatgtcagaagaggacttcatagaggaggctgaagtaatgatgaaactctctcatcccaaactggtgcagctgtatggggtgtgcctggagcaggcccccatctgcctggtgtttgagttcatggagcacggctgcctgtcagattatctacgcacccagcggggactttttgctgcagagaccctgctgggcatgtgtctggatgtgtgtgagggcatggcctacctggaagaggcatgtgtcatccacagagacttggctgccagaaattgtttggtgggagaaaaccaagtcatcaaggtgtctgactttgggatgacaaggttcgttctggatgatcagtacaccagttccacaggcaccaaattcccggtgaagtgggcatccccagaggttttctctttcagtcgctatagcagcaagtccgatgtgtggtcatttggtgtgctgatgtgggaagttttcagtgaaggcaaaatcccgtatgaaaaccgaagcaactcagaggtggtggaagacatcagtaccggatttcggttgtacaagccccggctggcctccacacacgtctaccagattatgaatcactgctggaaagagagaccagaagatcggccagccttctccagactgctgcgtcaactggctgaaattgcagaatcaggactttagtagagactgagtaccaggccacgggctgcagatcctgaatggaggaaggatatgtcctcattccatagagcattagaagctgccaccagcccaggaccctccagaggcagcctggcctgtggcatcagtccctgagtcaccatggaagcagcatcctgaccacagctggcagtcaagccacagctggagggtcagccaccaagctgggagctgagccagaacaggagtgatgtctctgcccttcctctagcctcttgtcacatgtggtgcacaaacctcaacctgacagctttcagacagcattcttgcacttcttagcaacagagagagacatgagtaagacccagattgctatttttattgttatttttaacatgaatctaaagtttatggttccagggactttttatttgacccaacaacacagtatcccaggatatggaggcaaggggaacaaagagcatgagtctttttccaagaaaactggtgagttaagtaagattagagtgagtgtgctctgttgctgtgatgctgtcagccacagcttcctgccgtagagaatgatagagcagctgctcacacaggaggccggatattctgagaagcagctttatgaggttttacagagtatgctgctacctctctccttgaagggagcatggcgagacccattggatggattggggtgaacagttcaggtcccatgcttggagcattgggtatctgatgtctgcaccagaacaagagaacctctgacggtggagaaccatgtggtgcaagaagagatcttaggtctcttcttttataccaagctcatcttttataccaagctgtgcaggtgactatgcctcctcttctgcacagaatgcttccaccagcatcctgagaagaaatgattacttctgaaaaacatccttttttccagcctctgggaatcagccccccctctctgcactatccgatcctcatcaacagagggcagcattgtgttggtcaatgttcccttggcgagcaattgaaacttgtttaggccctagggttgagcaattttaaggttgagactccaagtctcctaaaattctaggagagaaataaagagtctgtttttgctcaaaccatcaggatggaaacagtcaggcactgactggggtgcttccaagaggcatgagagtgcctactctggcttgagcacttctatatgcaaggtgaatatgtactgagctaggagacttccctgcaaaatctctgttcaccctgggttcacatccccatgaggtaatattattattcccattttacaaataatgtaactgaggctttaaaaagccaagacatctgcccaaagtgatggaactagaaagtctagagctggtattctagcccaaatctgtctgaccgcaatacacagattctttattcctattcgacactggcttctactgaaaatgaaacggattgcagagggaataaatacaaagatggaaagccagtaaagaagtcagtatagaaccactagcgaatagtgttgctctggcacagaccactgtggttgatggcatggccctccaacttggaataggattttccttttcctattctgtatccttaccttggtcatgttaatgactttggagttattcagttaatgaccctttaattctcacaaccaaccagtcatgttgcttgaagccatttatagacgagcttcaaagcaactttaaaagattcttctgtagaagtatgagttcttcctttaattatcattccaactttcagctgtagtcttcttgaacacttcatgaggagggacattccctgatataagagaggatggtgttgcaattggctctttctaaatcatgtgacgttttgactggcttgagattcagatgcataatttttaattataattattgtgaagtggagagcctcaagataaaactctgtcattcagaagatgattttactcagcttatccaaaattatctctgtttactttttagaattttgtacattatcttttgggatccttaattagagatgatttctggaacattcagtctagaaagaaaacattggaattgactgatctctgtggtttggtttagaaaattcccctgtgcatggtattacctttttcaagctcagattcatctaatcctcaactgtacatgtgtacattcttcacctcctggtgccctatcccgcaaaatgggcttcctgcctggtttttctcttctcacattttttaaatggtcccctgtgtttgtagagaactcccttatacagagttttggttctagttttatttcgtagattttgcattttgtaccttttgagactatgtatttatatttggatcagatgcatatttattaatgtacagtcactgctagtgttcaaaataaaaatgttacaaat

SEQ ID NO: 104 - DNA, 2416 bp, Artificial Sequence
  LHX2
gactgcagagccggggctgggctaggcgcgcgcttggagagcattgcgcgcggctgggcccgcggccggcggctcctcctcccactctgctcctcctcttttttctcctcctccacctcctcctccgcctcctcctcctcctcttcctcctcctcttcaattctcccggtggctcgactcggctcgcaggcttcggagaaacccctactccagtcgccgactcagcgcccaagagggtcgccttgggctgggggcgcaccccagggaggggaggggtccaggcagctgggccgccgcggacacctagcggcttcagggtgaaccccgaccgcagccgtcgccgcctcgggcagagtttgcgcccttgctttgcgccccgggcgctgaagccgggcgggcgatgcccgcggcgtgaaagcgcccgcggcgggcgccgacctctgtcctagtctcctgctccccccgccccgcttgtcccgtgcccttgtgaccctggctttggcgccgtcgcccaggcgccccgcaatgtagctgcccctgcgcctcggcgggaggcgtcctgccccgcgagcgcccggggcccggagcccggcctgggggctcagccgagctcgggcggggccggggccgcggtggcgatgcaccgggcccgttagcgccaggagcgccaggcagctgaggcggggggcaagccctccctcggaggagccgcgcccccggccccgccggtcccgccgcgatgctgttccacagtctgtcgggccccgaggtgcacggggtcatcgacgagatggaccgcagggccaagagcgaggctcccgccatcagctccgccatcgaccgcggcgacaccgagacgaccatgccgtccatcagcagtgaccgcgccgcgctgtgcgccggctgcgggggcaagatctcggaccgctactacctgctggcggtggacaagcagtggcacatgcgctgcctcaagtgctgcgagtgcaagctcaacctggagtcggagctcacctgtttcagcaaggacggtagcatctactgcaaggaagactactacaggcgcttctctgtgcagcgctgcgcccgctgccacctgggcatctcggcctcggagatggtgatgcgcgctcgggacttggtttatcacctcaactgcttcacgtgcaccacgtgtaacaagatgctgaccacgggcgaccacttcggcatgaaggacagcctggtctactgccgcttgcacttcgaggcgctgctgcagggcgagtaccccgcacacttcaaccatgccgacgtggcagcggcggccgctgcagccgcggcggccaagagcgcggggctgggcgcagcaggggccaaccctctgggtcttccctactacaatggcgtgggcactgtgcagaaggggcggccgaggaaacgtaagagcccgggccccggtgcggatctggcggcctacaacgctgcgctaagctgcaacgaaaacgacgcagagcacctggaccgtgaccagccatacccgagcagccagaagaccaagcgcatgcgcacgtccttcaagcaccaccagcttcggaccatgaagtcttactttgccattaaccacaaccccgacgccaaggacttgaagcagctcgcgcaaaagacgggcctcaccaagcgggtcctccaggtctggttccagaacgcccgagccaagttcaggcgcaacctcttacggcaggaaaacacgggcgtggacaagtcgacagacgcggcgctgcagacagggacgccatcgggcccggcctcggagctctccaacgcctcgctcagcccctccagcacgcccaccaccctgacagacttgactagccccaccctgccaactgtgacgtccgtcttaacttctgtgcctggcaacctggagggccatgagcctcacagcccctcacaaacgactcttaccaaccttttctaatgactcgcaacccctcaccccacaatttctttaaaaaagaaattatctttagttgaattccaagtgtattttaaaatagaggctttgagcaactaactaaccacattttaggatctcgcctggaaacagaggtaaaaaaaagaagtgtgcgcccggctaatgcagcggtgtggaccgaggaacaacttggaagatctacctgcaacacaacatttgtgtcactgtacagttttgtggactgagcgaggaaaaacaacaaataatttaagttggctagagcttctgtattttcaaagactgccacgtgccttaggaatactgttttatctccatactttggatgacttgttcatttttctctccctctttttctctgtatatttatgaccagagcaaaaatgtaaaaaacaaaaaaaacaacaaaaaaagtttgttactttgaatagtcctaaaaag

SEQ ID NO: 105 - DNA, 2941 bp, Artificial Sequence
  PELO
gatttggcccggagaacgagatcaccctctcaatgaaaggcagatgtccctttaaggtttgcttctacagcccgtggactttagcctaaacacggacccgcgaagctggctttatttgtccatgtctcggacagagcctgggaagctgccagtgagatttcagagaccaagagcgcgaaggggcgggcgatgtggcaatccgtctgggatgtgaaaagcgtggagcgcatttagaggaattcgacgaaaacacaggaaatcactcctctcccgctcctgggcgccgctgccactggggcagaggactgggaaccgcggcagcgggataagtggcccagccagagagcgcagctcccgcgcccggtcctgccctgcgaaccagcgcggccccctggcgctgaggctgctccggccatggcccctcggccccgcgcccgcccaggggtcgctgtcgcctgctgctggctcctcactgacagggatggaagagaaaacttaggaagttgaagtttggcattaaaataaaggactcgccaccactctgtgcaccttcttgagggagttcattcgtccggagcgcctcacagcttagtgcgcctgcgcacgcgcgaactgcggccccgcctctcctttggggacgggagacgtgcgtcgggtcgcgggacgggggctgcgcatgcgccttcatttcgtcagcccgctgttgcgtgctgccagcgggaactgtgtaggggtagattttcgctgcagtgttccccgagcctgttagacgcagcgcgccgggagactgagagaggaaaggatagaggaagtgctgccctaggctgcatgagtcgaagcaagcgtgtttccttcccgccaggcaagtgcccttagaaaccgggccccgcccccttcctggcctgcattcccatcccctctcccggggcggaggtgaggacctccttggttcctttggttctgtcagtgagccccttccttggccatgaagctcgtgaggaagaacatcgagaaggacaatgcgggccaggtgaccctggtccccgaggagcctgaggacatgtggcacacttacaacctcgtgcaggtgggcgacagcctgcgcgcctccaccatccgcaaggtacagacagagtcctccacgggcagcgtgggcagcaaccgggtccgcactaccctcactctctgcgtggaggccatcgacttcgactctcaagcctgccagctgcgggttaaggggaccaacatccaagagaatgagtatgtcaagatgggggcttaccacaccatcgagctggagcccaaccgccagttcaccctggccaagaagcagtgggatagtgtggtactggagcgcatcgagcaggcctgtgacccagcctggagcgctgatgtggcggctgtggtcatgcaggaaggcctcgcccatatctgcttagtcactcccagcatgaccctcactcgggccaaggtggaggtgaacatccctaggaaaaggaaaggcaattgctctcagcatgaccgggccttggagcggttctatgaacaggtggtccaggctatccagcgccacatacactttgatgttgtaaagtgcatcctggtggccagcccaggatttgtgagggagcagttctgcgactacctgtttcaacaagcagtgaagaccgacaacaaactgctcctggaaaaccggtccaaatttcttcaggtacatgcctcctccggacacaagtactccctgaaagaggccctttgtgaccctactgtggctagccgcctttcagacactaaagctgctggggaagtcaaagccttggatgacttctataaaatgttacagcatgaaccggatcgagctttctatggactcaagcaggtggagaaggccaatgaagccatggcaattgacacattgctcatcagcgatgagctcttcaggcatcaggatgtagccacacggagccggtatgtgaggctggtggacagtgtgaaagagaatgcaggcaccgttaggatattctctagtcttcacgtttctggggaacagctcagccagttgactggggtagctgccattctccgcttccctgttcccgaactttctgaccaagagggtgattccagttctgaagaggattaatgattgaaacttaaaattgagacaatcttgtgtttcctaaactgttacagtacatttctcagcatccttgtgacagaaagctgcaagaatggcactttttgattcatacagggatttcttatgtctttggctacactagatattttgtgattggcaagacatgtatttaaacaataaactaaaaggaaataatctccacgtactaccatcttgattaaattgtgtaattttttataggaattatgagttatctgtagtacttggaaacagaaaatgtgtgtatttaaagacgatgcctatgcagtatattgtttgggatagattgcaaaatttcacactgcatgctttgaaacagttttccttagaaaaagcttttgctatcttatcctgtttacattatttctttattttaattctgcttggtgttcttgcattgcatttaatgatcccttttctccccacctccacacactacattttttttagatttaaatagttttactattttaaatgattgccgtacaattagtagacttgaagacaagttttaaatatttttcttcaaaggcttgttaaaccaatcatgttaaaaggaaattcttggttttggtttgttgttgttagcattagtcatatttgatttagagggtaacttaaatcagttatttttagctttttagaactttgatctgctagggattgtcaaaataatctccttgaggcatctttatttttaaaatgagattaaagtatgtgatttgcttgttatgtggctaaaaaaaaaaaaaaaaaaaaaaa

SEQ ID NO: 106 - DNA, 3870 bp, Artificial Sequence
  CDK5R1
gagcgccgggaccgcggcggcggggccgcggcgcgcattgcggagggcgcggagcgcaggagctgccgcctgccgggcagatccaagggggcagcacgcttcccgggagcgcccccgcctcctctccggggccgccgcaggctcggtgagcggttttatccctccggccggcaggctgggcgcgcaggggcgcgagcccccgcccggcgcgcagcagcaccatgggcacggtgctgtccctgtctcccagctaccggaaggccacgctgtttgaggatggcgcggccaccgtgggccactatacggccgtacagaacagcaagaacgccaaggacaagaacctgaagcgccactccatcatctccgtgctgccttggaagagaatcgtggccgtgtcggccaagaagaagaactccaagaaggtgcagcccaacagcagctaccagaacaacatcacgcacctcaacaatgagaacctgaagaagtcgctgtcgtgcgccaacctgtccacattcgcccagcccccaccggcccagccgcctgcacccccggccagccagctctcgggttcccagaccgggggctcctcctcagtcaagaaagcccctcaccctgccgtcacctccgcagggacgcccaaacgggtcatcgtccaggcgtccaccagtgagctgcttcgctgcctgggtgagtttctctgccgccggtgctaccgcctgaagcacctgtcccccacggaccccgtgctctggctgcgcagcgtggaccgctcgctgcttctgcagggctggcaggaccagggcttcatcacgccggccaacgtggtcttcctctacatgctctgcagggatgttatctcctccgaggtgggctcggatcacgagctccaggccgtcctgctgacatgcctgtacctctcctactcctacatgggcaacgagatctcctacccgctcaagcccttcctggtggagagctgcaaggaggccttttgggaccgttgcctctctgtcatcaacctcatgagctcaaagatgctgcagataaatgccgacccacactacttcacacaggtcttctccgacctgaagaacgagagcggccaggaggacaagaagcggctcctcctaggcctggatcggtgagcactgtagcctgcgtcatggctcaaggattcaatgcatttttaagaatttattattaaatcagttttgtgtacagtatgtgtctagcaaagccaccaagggcctcacctttcccacagtctctccctggggtttttttcatccctgccaagaactctgggcacttttgaactcacgagccttgcgcaaaacccagaagatgtattcagagccacccaggccactgacctcccactttggggaactcaaaggactgacctgcccctgccgcctgtgcccttgctgggtccagggtaggcaaggctgccggctgcaccctgtatggagctagagaggggcctctggctgcctggcccagggaggaattggggtttctggttggaggcccttttctggctcctgtgtggagttattcactctcccagaggctcctggagccagccaccctaactgagctgccagtggggtcgtgaggcaagatccccgccacccggggacatcttcaatctaggcgaggcgaagctgagcgggtctagtggaaagattgtgtctggtcgtttgaccacacaccgccctgatttgctgttttctttttttagggagaagggcttttctttagtggagaaatggaactcgcccccctacccccttgtctgctgctcccagccacgttggtggtattggccgatgagctggtttgactcattaatttctctcaatttgggtcccagctaaagaggtggggtgaagctggggacagctttcctgggtgagtttttcttttgaataatgtagtgcagtcaccctgtggcaaatgccaggacagctgcaggtgcccattagcaacgcctgccttctgggcaaggtgagggatgccataccttgagaccaagccggtgcccacctaagggctaaggcctcttgctggtgcacatgacatttgtcctgcagagctggggggaaggcgatgtggtgaccccacccccacccgttaatttaaagctgtttctaaacagttgagtttcttctaaagaggaagccttgcccagcaaggaccagtgagacagccggatcttggagacaattacaagacggggagtgagactcctgattgctctggaagcctgctgatttctacaactgatcatttgcagctgctggttttggtttccaccttaccctactggctgtaaaaacacaaatgtgtactttattgattttctttctaattctcccgcattggtggcttgggacttgggagagggagcaagccttcctccatggcccatcactcggctgtggagaacaaagaccaatgtgaagacactacagaggattctgtcttccaggcccagtccactggggagtgctggaatggggacctggggtggggaggcagagggtcactttacataggattaagttcgaggtggctaccgatttcagcacatgcactactgaaatttacacaaaaagaaagctgtgaaattgaagtcccaatttaagagtcctgaggcagaacctggtggctggaggcattcccagaggtggggaagagagcctgcccggccggagaacatctgccttgctgcacctgaggcccagcagagccgttcctgggactgtcagataatcggtgcagcggtggaaggagcctgcggctgctggcacagacttcacacagcacctcctctctgctgggtttccacacagcctgtcttcagatcctgctgccgcgtgcgaccagaggtgggaggcccctggtggcatggaagagggagggtcagtgccaagtctcaggaggagggcgcatgtgtgtatcaccctcagctggcggaacctggctgcgaactgtgcagttacgttgcatccacaggattccagttgcgtgtctgtttccttctctttctccgtatttatttttttattcttcggaggaggtggacatttcggaagtggtggggactaagggaagaactctctagttccctcagtgtgaagcctgtcgtgttctctccccttgcactggtcatcagtattgtgtaaaggaacaactgatatacttgagtgtgcaagcaaagaacccatttgccatgctgctatgaagactacttttagatcaacaataaaaaaaaacctacaaaaaaacctttattctttaattgttgcttttacggtgatattgtgcatgcaaaccaggagcattttgtgtcttaagaaaaataatcttagaacagatggctgtgaaaattacacccatgcacagaacaagccacaggaataatagttcaggatttggtttttctctttttcttgtaaacctggagggttgatatattctttccatgcagttattagaacttagttttgttccaacagttaaacttgcaatgaaaagaaaatgtgccatttttttcactcagaattattcatagctgtatatttgaaactgctaattacacacgtgtgatgtatgttggttttttagtgcaatttcttctgtagctattctttgaccaaactgtgggtattgttaatattaatttatatttgtctcattttgtatgtatgtgtagtgtgtttgtgagtatgtgtggtttataatctgacaaagtcatgaagctcagtttggctgtaatttaattccccttcccttatttttatttatttttgtactgtgctgattcaataaaatgcactgaccatccaaaaaaaaaaaaaaaaa

SEQ ID NO: 107 - DNA, 2200 bp, Artificial Sequence
  CPLX1
gtgacgcgccctcctcgcggtgcccttcagccgccgccgcagctcaccgggcgccacatggacccagccggcccgagcgcgccccgccgctgaccgcccgcgccccgggaaggaagaacactcgctcccggccatacttgcgtgtgagttctgacccctggaggagccactgtggaagcagagcaatcgccatggagtttgtgatgaagcaggctctaggaggggccaccaaggacatggggaagatgctggggggtgacgaggagaaggacccagacgccgccaagaaggaggaggagcggcaggaggcgctgcgccaggcggaggaggagcgcaaggccaagtacgccaagatggaggcggagcgcgaggccgtgcgccagggcatccgagacaagtacggcatcaagaagaaggaggagcgcgaggccgaggcccaggccgccatggaggccaactccgaggggagcttgacgcggcccaagaaggccatcccgccgggctgcggggacgaggtggaggaggaggacgagagcatcctggacaccgtcatcaagtacctgcccgggccgctgcaggacatgctcaagaagtagccgcgcgcgggacagcggccccgcggagcccccgcccctccccctacagatcctccgcggaggcccctgagggacgagcagagcgcagcccccacgccgatataagccatagccccaggcccgccctgcccgcgcccgccgcctccctcacccggcaaggggcgcgcgcccccaggacccccccagtccgccccgtgctcctctgcccgcgggtggctggagccccatcgcctgggacgcccctttctcttgctgtttaccgcccacccagcagcgcccgaggccagggccgccgaagggcagccccgcgaccacccctgtgcgcgcgttcgcggcggtgggcgcctgtcgggcccgcactcaggagcacagccatagcagacggggggctgcgggcggggcgagggcggcggggcctgggtccccctcctgcacgcggactccggggttcggatcgctccgccgtgagtatttgcgtccgcacgcggccgctctccgccccccggcctggccccctcgcgcccctgtccatccgtctctgtccgcgtcctttcctctcctctctggaaggttttgcttcttacgaacgccacggccgtgttcacttctaaactaaaggaaacaaagcaataggtttgggggacgcccagcccccacccccgtcaccccgctcttcccaagtcctcgccccccgcccggcctcctagcctctccgcccacgcggctgctgcttctccctggggaggacccctgccctcggccattgaacactgcaccctccacaggagccgcagaggcccgaggcaccggacgctggagaccctgcgcccctgcccagcacctcctccgtgggcagctcctcgggtggggcctgcggggttccctgcgcgcagctggcgcgtgtgtggcctaatccacctggtggccctgcggggcggcatccgagcccctgtttctcctccattcatgtttaatttgcatcacaatttgttgaatctcaggtaaatgaggtctttgcatttaatgagttttatcttgacaggcgccgcctcgcccccgggccctttcgtccacatcaaaaatgcatcaagtctccacgtgtttcgggccagggcgtggcttggcattgaccttcatgaccttacatagctttagagaagccataacgttagactgcaatactaacgaccgacgcccctccgggcagagaccaccgcgcccctctgcgccccagcgacgcggcccgcggggacgtcgctgtccgtcctgctcgccctgtgccctctcactgacttctcccgggtcgtgtcttttaaaaactcctgttttcacaccttacaaagccagctctgagcagacagggcgtcctctcgtagaacctgcgcaccccgttcccagcgcatggcgccccgggccgcgagcttagcttagaccgtggtgtcctctgtccgtctgtcctgcgcctgcgcctcctcctgcatgtcggggcccctgcgtgtgttctctccggatggaatcacagccaataaacaccagtgatttcaaaaaaaaaaaaaaaaaaaaaaaaaaaaaaaaaaaaaaaaaaaaaaaaaaaaaaaaaaaaa

SEQ ID NO: 108 - DNA, 3866 bp, Artificial Sequence
  CDC40
ctccgcagaagatttgttgccgtcatgtcggctgcgattgcagctctggccgcttcctatggttcgggttcagggtccgaatcggactcggacagtgagagcagtcggtgtccgctgccagccgccgactccctcatgcacttgactaaatcgccttcatcaaagccgtctctagcagtggcagtggactcggctccggaggtggcagttaaggaagatttggagactggagttcaccttgaccctgccgtcaaagaagttcagtataatcctacctatgagaccatgtttgctcctgagtttggaccagaaaatccctttaggacacagcaaatggctgcccctagaaatatgctttctggatatgccgaaccagctcatatcaatgatttcatgtttgagcagcaaaggagaacttttgcaacatatggttatgcattagacccttcattagataatcatcaagtgtctgctaaatatattggttctgtagaagaagctgaaaaaaatcaaggtttaactgtatttgaaactggtcagaagaaaacagaaaagaggaaaaagtttaaagaaaatgatgcatccaatattgatggttttttgggaccatgggcaaaatatgtggatgaaaaagatgtagccaaaccttcagaagaagagcaaaaagaattggatgaaatcacagcaaagaggcagaaaaaaggaaaacaggaagaagagaaacctggggaggagaagacaatcttacatgttaaagaaatgtatgactatcaaggcaggtcctatcttcacatacctcaggatgttggtgttaatctacggtcaactatgccacctgagaagtgttatcttcccaaaaaacaaattcatgtgtggtctggacacacaaagggcgtcagtgcagtcagattgtttcctctctctggccatttattgctgtcttgttccatggactgtaaaattaagctatgggaggtttatggagaacggcgctgtctgagaacatttattggtcacagtaaggctgttagggatatctgcttcaatactgcaggaacacagttcctcagtgcagcctatgacaggtatcttaagctctgggacactgagacaggacagtgtatatcaagatttacaaaccgaaaagtaccttattgtgtcaaattcaatcctgatgaagataagcaaaatctctttgtggctgggatgtctgataagaagattgtgcaatgggacattcgaagtggagaaattgtgcaggaatatgatcggcatttgggagctgtcaacaccattgtttttgtggatgagaataggagatttgtgagcacatctgatgataaaagcctaagagtttgggaatgggatatccctgtggatttcaagtacatagcagaacccagtatgcactcaatgcctgcagtgactttgtctccaaatggaaaatggctagcatgccaatcaatggacaaccaaatcttaatttttggagcacagaacagatttagattaaataagaaaaaaatttttaagggccatatggtagcaggctatgcttgtcaggtggacttttcaccagacatgagttatgtgatttcaggagatggaaatggaaaattaaacatttgggactggaagaccacaaaactctacagtcgatttaaagctcatgataaagtgtgtataggtgcagtgtggcatcctcatgaaacttctaaggtcataacatgtggttgggatggtctcattaaattgtgggattaatgagattaatccttaaactagctgggatcatttttgatccattgtcatatttatatttaattattaaatgtatctgatgataacttgatttacagataatgttgatgacattgaccctttgtttaaaaaaagaaactgtaaatttgacataatttcatttgcaacttcattttgttttttataaatgttatttatacagaaagtggctattgactttctatttgacaagtagttataattggcaagcagtttgagtttatactcatgacatactgaaagcatctctttggggtcaagaaagaatccctagtggatttgggattctagaggaggtgttataattaattattcagaaaaatgcatgtatttacctcttcaaccaaaagggcagtaaagaatagggataatatattttaatgtaaatttggaagaaggataaaatcacccacagttactctccctattattttcactgggtcaagttttaatcttttggcttcatgagttccactccctttgatgatatatgttgtatatttttagttgtaaagcagtaatctttaactgtagcattcctctaattataaacagtgaaaaatcaaaatcagtccagagttcttttgttgacttaattcctgatcagtatagacaggactatatatatttaatcagagaattacattatatctgaagatggagctcaggagaatgcaccaagactttgaattgtatttacattcactgtcagtaaagacctggctacgctttgagaaatcaggatctcctaggtcattgcttcgcagctgtgattactgaaatcctcctcataggagataaagtacgaggggtagagtccaagatgtcaacttgtaatttctttgaagtcatatgttttatctttaaaattattcttattttacctgtgaatatatacaacagaactttttaagattaaaaaatttttaaacctctatgtctgaaaaaaaaaatgacactcctggaagatggctagggttccccagtttgagaagcagtggccatggtgaaaaatagtttttgaaaacatcagattataaaatcaagatagtccggacgcggtggcacatgcctgtaatcccagcactttgggaggctgaggcaggtgaatcacctgaggtcaggagttcaagaccagcctggccaacatagtgaaaccccgtctctactaaaaacacaaaaattagccaggcttggtggctggcgcctgtaattccagctactcagaaggctgaggcagggagaattgcttgaacccaggagtggaggttgcagtgagctgagatcatgccactgcactccagcctgggcgacagagcgagactccacctcaaaaaataaaatcaagataacctcttgaatgtaatagctcatagcactttaatttggcaagccatttttcctgttttattataaatctatattagatgtttgaatatggtttgaaatatttcactaccgtgctgaaaaaggttggttgatagcagcttggagtgctaactggaagatcaaaatcatgtctcttgctgataacctaagagcattaagctctgagtccagtgaggtcatagcagtgtatgctccttgcccttacggagtgtctgtttttagaaatttagattttaaaaggcgtgggacatacgaccaggccctatagccacataaatataaatttcatagaaaaagaataaaagcggagatatattttttgacacagaggcacccaaagaaatacaaacattgcctagctgctgccatttctgtaactgcccagaagggtgacagatttctgaaggggaaaggattcagatatgaccttttctttagtcccaaccactagttttaacaaatgtgaattattgaaatgtgaagggacaaaaagaatcatacatttaaactgtcttgttcagcataccaatattgtatgttacaaatcatcatttctaaatctggattgattctgttgtgtttttgactgtttctaaagtaagtgtgtataaaagtctcctttttaaaaagatcatatttttaaataaagcattttttgtagaaaaaaaaaaaaaaaa

SEQ ID NO: 109 - DNA, 2782 bp, Artificial Sequence
  PANX1
gggcggcgcggaggggcagggccagagggaagcgctttgttccgcgcgtggttcccgcgcctgggggtgcgcgggagaggcgcgaatccgagtgccgcgcgcggcccggggacttgcacgggcgtgcggggtggaaccgcaggaagcggagctctcgggttcccgccccgccccgccccgccggcggcggaggcagcgagcgcgagagcccagcggagtcgctgggagcctgaggcaccgagacacaaaggcaggcgggatgcgggagcaggcaaagggaaagcgaaagccgcgcgcccggccggtgactgggtgaaggcgccgcgcagctttcccgacgccggctgtacccggacctcctggtcgagcctggcgcgccgcagccatggccatcgctcaactggccacggagtacgtgttctcggatttcttgctgaaggagcccacggagcccaagttcaaggggctgcgactggagctggctgtggacaagatggtcacgtgcattgcggtggggctgcccctgctgctcatctcgctggccttcgcgcaggagatctcgattggtacacagataagctgtttctctccaagttctttctcctggcgtcaggctgcctttgtggattcatattgctgggcggctgttcagcagaagaactcactgcagagcgagtctggaaacctcccactgtggctgcataagtttttcccctacatcctgctgctctttgcgatcctcctgtacctgcccccgctgttctggcgtttcgcagctgctcctcatatttgctcagacttgaagtttatcatggaagaacttgacaaagtttacaaccgtgcaattaaggctgcaaagagtgcgcgtgaccttgacatgagagatggagcctgctcagttccaggtgttaccgagaacttagggcaaagtttgtgggaggtatctgaaagccacttcaagtacccaattgtggagcagtacttgaagacaaagaaaaattctaataatttaatcatcaagtacattagctgccgcctgctgacactcatcattatactgttagcgtgtatctacctgggctattacttcagcctctcctcactctcagacgagtttgtgtgcagcatcaaatcagggatcctgagaaacgacagcaccgtgcccgatcagtttcagtgcaaactcattgccgtgggcatcttccagttgctcagtgtcattaaccttgtggtttatgtcctgctggctcccgtggttgtctacacgctgtttgttccattccgacagaagacagatgttctcaaagtgtacgaaatcctccccacttttgatgttctgcatttcaaatctgaagggtacaacgatttgagcctctacaatctcttcttggaggaaaatataagtgaggtcaagtcatacaagtgtcttaaggtactggagaatattaagagcagtggtcaggggatcgacccaatgctactcctgacaaaccttggcatgatcaagatggatgttgttgatggcaaaactcccatgtctgcagagatgagagaggagcaggggaaccagacggcagagctccaaggtatgaacatagacagtgaaactaaagcaaataatggagagaagaatgcccgacagagacttctggattcttcttgctgatgatttttttccttgagctgtaaatctgtgacttctgcgacatgggatttaatttggctaaagcacccctgttggtttcacagctggtttgcaataaatggttcttggtggagatactgagcatgtcttattgagtccctaatggaaatggtgatcaacaaaaggttatggaagaatggtttatgaacttcccataggaagcacctgagagatagtaaactgcagcaagtaactatgtgtaagtcctcatcaaatgaaaagcagaaagacaagaacaattagtcaagagcagtagccctgtcagagcctcggagcaatacctttctgtacccgtggtgagacaagacccagagctactggaaaacaagcactttggaagatttgttttgttttcatggaataataatatgtcagggtataatttaacgtgagtttcttatgtgcccttaaagactgttagacaagaaaagcattcactggctaataatccataggtcgacctatgtcctaagttaggtgtaaggtccgatgccttggcccacactcgagctctctttacattgttagttgtcaaccttggctgatggaaatcccgtaaccactatttgttgcactgtgccttgaagggcagcaggcccaagtgctgctctgactgaaaactgagttaacaagatgaaatctaaaggatattcacagtgacttcaattcaggaagaatgcttccaaaagagcccagtggggaaatctgacatcacagaagacattaattcagtcactttcaaagagtttgtctacaggcggtttctctgttatcaaaggcatttgaaataggattttacttaaacaataatggaacacaggagtatttaaagtgaagaacactttgcctgaatgtgatcagggcacataagtgacattggcatgcttcatatggcgtgcttggagccagaaaaacttagcggtttattttgtttatatttaagcacagctttaaaaaattcattatcgtttattcagtgtccgaattgaggccatttgggaagaaaattctagcactggtggagaattatagaataaagattataaatggttggataagacaaaaaaaaaaaaaaaa

SEQ ID NO: 110 - DNA, 813 bp, Artificial Sequence
  CLIC3
acccgcgcctgaccgcggcagctcccaccatggcggagaccaagctccagctgtttgtcaaggcgagtgaggacggggagagcgtgggtcactgcccctcctgccagcggctcttcatggtcctgctcctcaagggcgtacctttcaccctcaccacggtggacacgcgcaggtccccggacgtgctgaaggacttcgcccccggctcgcagctgcccatcctgctctatgacagcgacgccaagacagacacgctgcagatcgaggactttctggaggagacgctggggccgcccgacttccccagcctggcgcctcgttacagggagtccaacaccgccggcaacgacgttttccacaagttctccgcgttcatcaagaacccggtgcccgcgcaggacgaagccctgtaccagcagctgctgcgcgccctcgccaggctggacagctacctgcgcgcgcccctggagcacgagctggcgggggagccgcagctgcgcgagtcccgccgccgcttcctggacggcgacaggctcacgctggccgactgcagcctcctgcccaagctgcacatcgtcgacacggtgtgcgcgcacttccgccaggcgcccatccccgcggagctgcgcggcgtacgccgctacctggacagcgcgatgcaggagaaagagttcaaatacacgtgtccgcacagcgccgagatcctggcggcctaccggcccgccgtgcacccccgctagcgccccaccccgcgtctgtcgcccaataaaggcatctttgtcgggagtgagggtgtcctgacatctgaagggc

SEQ ID NO: 111 - DNA, 2472 bp, Artificial Sequence
  KLHL41
ctttttacagctagacctgtgtgctgcaaggagctaaggccttcagtgtccccttccttacccaggtttctcacagaatggattcccagcgggaacttgcagaggaactgcggctttaccaatccacccttcttcaggatggtctaaaagatctcctggatgagaaaaaattcatcgattgcaccctaaaagcaggtgacaaaagtcttccttgccacagattgattttgtcagcttgtagtccttacttccgtgagtactttttatctgaaattgatgaggcgaaaaaaaaggaggtagtgctagacaatgtggatcctgctatacttgatttaatcatcaaatacctgtactctgccagtattgatctcaatgacggaaatgtgcaagatatttttgcattggccagccgctttcagatcccctcagtgtttactgtctgcgtttcttatcttcagaaaagacttgctcctggtaactgtctagccatcctaagattaggacttcttcttgactgcccgagactcgccatttctgcccgtgaatttgtgtctgatcgctttgtacagatttgtaaggaagaggactttatgcaactgtctccacaggaactgatctcagtcatttcaaatgacagcctaaatgtagaaaaagaagaagcagtatttgaggcagtgatgaaatgggtgcgaacagacaaggaaaacagggttaaaaaccttagtgaagtgtttgattgtatccgttttcgccttatgacagaaaaatattttaaggatcatgttgagaaagatgatataattaaaagcaacccagacctccagaaaaaaatcaaagttctaaaagatgctttcgcaggcaaactcccagaacctagcaaaaatgccgcgaagactggggctggtgaggtgaatggtgatgttggtgatgaagatttacttcctggttacctgaatgacattcccaggcatggaatgtttgtaaaagacctcatcctcttggttaatgacacagcagcagtggcttatgaccccacggaaaatgaatgctaccttactgcactggctgagcagattcccagaaatcattccagcattgttacccagcaaaatcagatatatgtggtaggaggactatatgtggatgaagaaaataaggatcaacctctacagtcatacttcttccagctcgatagcatagcatctgaatgggttggacttccacctctgccttcagccaggtgtctcttcggtctgggagaggtggatgataaaatctatgtagttgcaggcaaagaccttcaaacagaggcttcgctggattcagtattatgctatgatcctgtggctgcaaaatggaacgaagtaaaaaaactccctatcaaagtctatggccataatgtgatttcacataaagggatgatatattgtctaggaggaaagacagatgacaaaaaatgtacaaacagggtgtttatcttcaaccccaaaaaaggagattggaaagatctggctccaatgaaaattcctcgttccatgtttggagtagcagtccataaaggcaaaattgtgattgcaggaggtgtcactgaagatggtctttcagcttcagttgaagcttttgaccttacaacaaataaatgggatgtaatgaccgaatttccccaagaaagaagctccatcagtttggtcagcctggctggatctctgtatgcaattggtggttttgctatgattcaactggagtctaaagaatttgcacccactgaagtcaatgacatatggaagtatgaagatgataaaaaagaatgggctgggatgttgaaggaaatacgttatgcttcaggagctagttgcctagcaacacgtttaaatctcttcaaactgtctaaactgtgaacaaggtgacaaaacataatagattgggaggtggtttgtttggtgaatggggctttaatttattctgttttttaaaagcttgtacagacactcatgtagaaattattcaagaagttattgtctaagagatgagcagtaggtaagaaaacctcagtcattgactcttcaatgtaatgatcagagtttaaaaccattttctaataataaattaaatcttcagttgaacaaattattttgtgaatctgtttcactcaatggattgtaaagaaggctcctaaatttgagttgtttgctaatcatttcatttgcatcattagggtatccttaaactgattttctattacaattggaagtggagaatatgtgcatctacactaaaaaaatgtttaagatatcaaaaacctctcctcgtgcttcaaaatgacaggaatcctgtgcattatactaagaattacatgccataagatgacttcagaaatcctacttcagaagtgtaataaatggatggggaaatcgtttgatggggaaaagtctcttgtaagtaaaagtagtcaaattcaaatggcaaaaaaaa

SEQ ID NO: 112 - DNA, 1299 bp, Artificial Sequence
  CDR1
ttgttggaagacatgaagatgctggaagacacagagatgctggaagacgtggagatgttggaagacgagcagatgctggaagccctggagatgctggaagacctggagatataggaagacatggatttgttggaagacgtagcttagttggaagacatatattttctggaagacgtggattttctggaagacatggcttggttggaagacgtggattttctggaagacgtacctttgttggaagacatacctttgttggaagacgtacctttgttggaagacgtacctttgttggaagacacaagtaggctggaagacattaatttgatggaagacatggctttgttggaagacgtggatttgctggaagacacggatttcctggaagacctggatttttcggaagctatggatttgagggaagacaaggattttctggaagacatggatagtctggaagacatggctttgttggaagacgtggacttgctggaagacacggatttcctggaagacccggattttttggaagctatagatttaagggaagacaaggattttctggaagacatggatagtctggaagacctggaggccattggaagatgtggattttctggaagacatggcttttttggaagacgtagattttcaggaagacccaaattatccggaagacttggattgttgggaagacgtggattttctggaagactgggaggttactggaagacatggattttctggaagacatggattttctggaagacgtggatcttcaggaagacatatattggctggaagacctggattttttccggaagatgtggattgactggaagacctggatttggtggaagacgtagatttttctggaagacactgactgactggaagacctggatttctttctggaagacactgattgactggaagacctggatttctttctggaagacactgattgactggaagatctagatttttctggaagaactagatttactggaagacttggatttggtggaagacacagatttttctggaagacatggattagctggaagatctgtatttgatggaagaccttgaaattattggaagacatggatttcctggaagacgtggattttcctggaagatctggatttggtggaagaccagtaattgctggaagactggatttgctggaagacttgatttactggaagacttggagcttcttggaagacatggattgtccggaagacatggattgtctggaagatgtggattttctggaagctcaggattatctgg

SEQ ID NO: 113 - DNA, 1078 bp, Artificial Sequence
  MB
gcagcctcaaaccccagctgttggggccaggacacccagtgagcccatacttgctctttttgtcttcttcagactgcgccatggggctcagcgacggggaatggcagttggtgctgaacgtctgggggaaggtggaggctgacatcccaggccatgggcaggaagtcctcatcaggctctttaagggtcacccagagactctggagaagtttgacaagttcaagcacctgaagtcagaggacgagatgaaggcgtctgaggacttaaagaagcatggtgccaccgtgctcaccgccctgggtggcatccttaagaagaaggggcatcatgaggcagagattaagcccctggcacagtcgcatgccaccaagcacaagatccccgtgaagtacctggagttcatctcggaatgcatcatccaggttctgcagagcaagcatcccggggactttggtgctgatgcccagggggccatgaacaaggccctggagctgttccggaaggacatggcctccaactacaaggagctgggcttccagggctaggcccctgccgctcccacccccacccatctgggccccgggttcaagagagagcggggtctgatctcgtgtagccatatagagtttgcttctgagtgtctgctttgtttagtagaggtgggcaggaggagctgaggggctggggctggggtgttgaagttggctttgcatgcccagcgatgcgcctccctgtgggatgtcatcaccctgggaaccgggagtggcccttggctcactgtgttctgcatggtttggatctgaattaattgtcctttcttctaaatcccaaccgaacttcttccaacctccaaactggctgtaaccccaaatccaagccattaactacacctgacagtagcaattgtctgattaatcactggccccttgaagacagcagaatgtccctttgcaatgaggaggagatctgggctgggcgggccagctggggaagcatttgactatctggaacttgtgtgtgcctcctcaggtatggcagtgactcacctggttttaataaaacaacctgcaacatctca

SEQ ID NO: 114 - DNA, 970 bp, Artificial Sequence
  S100A2
ctcccctcaccccggtccaggatgcccagtccccacgacacctcccacttcccactgtggcctgggtgggctcaggggctgcccttgacctggcctagagccctcccccagctggtggtggagctggcactctctgggagggagggggctgggagggaatgagtgggaatggcaagaggccagggtttggtgggatcaggttgaggcaggtttggtttccttaaaatgccaagttgggggccagtggggcccacatataaatcctcaccctgggagcctggctgccttgctctccttcctgggtctgtctctgccacctggtctgccacagatccatgatgtgcagttctctggagcaggcgctggctgtgctggtcactaccttccacaagtactcctgccaagagggcgacaagttcaagctgagtaagggggaaatgaaggaacttctgcacaaggagctgcccagctttgtgggggagaaagtggatgaggaggggctgaagaagctgatgggcagcctggatgagaacagtgaccagcaggtggacttccaggagtatgctgttttcctggcactcatcactgtcatgtgcaatgacttcttccagggctgcccagaccgaccctgaagcagaactcttgacttcctgccatggatctcttgggcccaggactgttgatgcctttgagttttgtattcaataaactttttttgtctgttgataatattttaattgctcagtgatgttccataacccggctggctcagctggagtgctgggagatgagggcctcctggatcctgctcccttctgggctctgactctcctggaaatctctccaaggccagagctatgctttaggtctcaattttggaatttcaaacaccagcaaaaaattggaaatcgagataggttgctgacttttattttgtcaaataaagatattaaaaaaggcaaaaaaaaaa

SEQ ID NO: 115 - DNA, 510 bp, Artificial Sequence
  S100P
tgaggctgccttataaagcaccaagaggctgccagtgggacattttctcggccctgccagcccccaggaggaaggtgggtctgaatctagcaccatgacggaactagagacagccatgggcatgatcatagacgtcttttcccgatattcgggcagcgagggcagcacgcagaccctgaccaagggggagctcaaggtgctgatggagaaggagctaccaggcttcctgcagagtggaaaagacaaggatgccgtggataaattgctcaaggacctggacgccaatggagatgcccaggtggacttcagtgagttcatcgtgttcgtggctgcaatcacgtctgcctgtcacaagtactttgagaaggcaggactcaaatgatgccctggagatgtcacagattcctggcagagccatggtcccaggcttcccaaaagtgtttgttggcaattattcccctaggctgagcctgctcatgtacctctgattaataaatgcttatgaaatga

SEQ ID NO: 116 - DNA, 7233 bp, Artificial Sequence
  RIMS3
cgtgggctgctgcggagccggcagcgcaggcgggcggagcggagctgcccccgtggtggcgggcgatgcccccgtgagcctccctcgccgcccctccccgccccgcgtgcctatccactcggagtccgcgccagcctggggccgggccgcgcctactgccgggttcgcggggcggggtcccggggcagcacctgccccgccttgcggagccgcctcggcctgtggaggccccctccctgtctggaccccggccccacctccggacccttttatcacatcgcctcctctgggagcctgccctgattgccttcacctcatttcttgaaaattggtgttttggcagaagtcaattgaagccttgtgcaaatgccctaggggtgtgctgttgggaggcagccccctgtgatgcggaacaccaggctcagattcatcagttcgagctgcctgaggccctgccaccccggggaccatgtttaacggggagccaggtcctgcctcatctggggcctccaggaatgtggtgcggagctccagcattagcggtgaaatctgcggatcccagcaagccgggggcggggctgggaccaccaccgccaagaagcggcggagcagcctgggtgccaagatggtggccatcgtgggcctgactcagtggagcaagagcacactccagcttccgcagcctgaaggggccaccaagaagctgcgcagcaacatccgccggagcacggagacaggcatcgcggtggagatgcggagccgggtcacacgccagggcagccgggagtccaccgatgggagcaccaacagcaacagctccgacggcacgttcatcttccccactacccggctaggggctgaaagccagttcagcgatttcctggatgggctgggaccagctcagattgtggggcgacagacactggcaacaccacccatgggagatgtgcacattgccatcatggaccggagtggccagctggaggtggaagtgattgaagctcggggcctgacccccaaaccaggctccaaatccctcccagccacctatatcaaggtttacctgctggagaatggggcctgcttggccaagaagaagacaaagatgaccaagaagacctgtgatcccctgtaccagcaggctctgctctttgacgagggaccccagggcaaggtgctgcaggtgatcgtctggggagactatggccgcatggaccacaagtgcttcatgggcatggcccagatcatgctggacgagctggacctcagcgccgcggtcaccggctggtacaaactcttccccacctcctcagtggcagactccacactcggatccctcaccaggcgcctgtcccagtcttccctggagagtgccaccagcccctcatgctcttaaggatgtcaggaagaggccaggatggtggtgtggggaggggtgcctgctggccccatgtcctcccctgtacatagtcttcgtgtctttctggaccccttgtcctgctgcatgcctgttggctactgggctcatcccagctggcagtggagactgtagtgtgtgcgtgtgtgcgtgcgtgtgtgtgtgtgtgtacgtgaccacgttctatctgttcatttgtctgggtatagtcactcctggtgatgatatgggctgaaatgtctccacgtctctttgtgtcttgttgaaaagaaacccaaaggagtgttgtgtggacatgactcaccctgaggagtctccagggatggaggtggggcatgcggccactggtcggtgctgcctggtcctggcctggggcagagcctgtgtgttcttcacctgtgcctgctcctggtggtctctgctttgttttctgtcttgtcttttgttccactcttgactctcccggctctgccactgttttctgagaaatgtagcatccgctgcagctggccacactgagggccctctgggaaccccaccccactggagccgctccggcagctcttcctgccactgaatgcgttctgcagcatgtagcatgcccacctagctccctggccagggccctggggaggcagagggtacccaggggactgagggcttagaaatgactttctctatgaggctggaacctcctccttcttccagtgaagcacgaggtcttggttccagggttcctggccaggtgcccccttagcatttgttcttcatctcctgtctcttcaagcctccccactccaccgtgccgaaggagctctgccagtgggcctgggcaggcagccacagagggcatgttatctgctaaagcaaacagtcctcctgaggccctgagggtggccctgaccccctcagggctcattcctggtgggcatgactcggtaaggaggttctgtgggtagggctgtttgctggaataaggagggctgaggctgagttgttccccgccactgttgaggatcccatctgacatttggggattcactgcatgaagttgttcatttggggctccagtttttgtgcatttccagaccagggtccctgtctgggagctcagacttagctgggctccagcagcctggctccggactctcgtctgccaccatcaccagctctgtctaagcaatacttacccctccgggcttccctgctttcctgtgccccactgctgccctctgcagagccatctgctccaggcacccacctgcctctgcttgctttctcacccatgtctggttggagcttctcacagccactcaaaccctgacttgatttgacaactgggccctgttggtggagaccagtgcctgaactggaccctgtgaaatctgtcccgtgggaatcctgaagtctgactcaggaatgcccagacctgtccctgtccctcctcagctctagggtgaaaggcgagaggttgcacaggacatggacagagcagcccttgggtttgtatctggtaggggagaaagcagcaggacagtggaggtgtgtggaaggcactctttccacctctctccaggcattatccccaggtgctgaaatggctgtggccccagcacctgaggcaggggtacgctacctggggtagcagtagaaaggtcttggggtctgaatgacttggggcctccattcataaccaaagttgtaggggcatggaggcagtggcgccttatggataggtcatctcagcccaaagggcctccttggctggcatggttctgtgttacgttgaagccagagtcttataacacctcccaagaaagataggggaagaagccagaaccccacctggcctgcccacaggacaagaagtgggtaagggcaggaaggaaatgaacggagttagctcccaggctcctatctctgcctgagcctctattcttatattatcagagaaagggaccattgggtgcatagagatggggaggaggccactgggctgaattttctctttaggcggaaatgctctccccaggcccattgcgttcgtcaagttcttggaaatggacaaagggctctgtcctcctcgaccctagtgggggatcaagaaggaaactccgttgcaaaagggtattttaatctcctgtttatgatatattcacctctagagcagtcactgtcagggtgttgcgaaaatactctacacctttgggatgatagggttgttagtgacccacaggacagtatagatgtttgtggatgtagcactgagtggtgatacccagaccagcagtcaccccaggaagtgggggctacccataccctcattcctctggtggggagctgcctgcagagaggcctgccactgggggttccaggccgtggtgacccttgcctctggggaagggttagcacaggggaggttctagctggaggaggggtctgatgtgctggtaacttgggctgacctacctacagtccctggctgccaaaactgctcagcagttgggccactccactattccacctctctaaaagaaggtaatttcctccccaaattgaccttggggaattattcttttaaccctttgcaccaaataagttactcatccccacctggattttaccccatgagggtaaagttgtgtgaggctgacacgtctgtgtgatgcagtgtggctgcacttaagggtctgtttctcagcatcatggatgcaggggcttgtctgaaaagccactctggacctagcctgtcccagaagaggagaatgcacaagtgtaactcctggttgtttgctggggtgggggagcatctgctgtttgaggacggggggtggggaaggaaggaacatgatccctccagaagtctcccaccctggggccaactcactgccatgttcagtgtcccggctccaaatgcccccttgcccagatgaaaccctgcagtggttacaggaatggagctctttgtcattccacctcctctggtcaggcgaggttcactgtgcatatggcagagacaggagtggccctgcagtgatgttgggttgtgggcagggacagtgatggatgactcagagcgtctgtctttgtatttctgctctgttcattctgtcccactttcttcatagactccttttccctgcaatgggtttttggtatgaaaaaggctccagtaaatggagccaagtcttggtttgacaaggggaacttgatccttcagggaagaatcatctccaaaatgactccccatctggtttcttctaccacccaattctactaggaaaggagcacttaggaggctcttgggatgcagcaagtcccaggcaatgccagcatttcatgggggctgaggcagaacccaggagctccaagaaaggccacccatagagctcatcctctgtggaatcactgccggttagaacactgaggtcaagccagtcctcccatggtcatgccacccaccagggaagcatgcctgatctcttctttactgccagccttgaggagagcagaagcctccatttttaaagacaataaagacctccaagggtacttctttggaaatgaaatgtagcacaatcttagcctacgttaccaggagccctgacatgcaaccagggtccctcttccatgccctgctgcccaggagttgctgagctcctcttcccctggggttccagccctcctaatacctcatattccccatcttcctcagcccagaaagcaatggggctttagtgatgctcctcttttgtgtctctctggttgcctctagcactgtgcaaactctgcaagaaattgctgcctttgcttgatgttgtagatgagttgccctccacctggctggagagatggcacatcattcagggccagaaggttgtccagcagtgtttctgcagtggctgcagggagatggaaaagaagagccctgcttccctgcctcctcctacctttctcttccactcctcagagttttcttctccagtatcctgacatgtaaagagattctttaaaatgctgcttcttctactggactgtctttcactgagtagtcagggaggagatgaaaatgtggacacatccccccgccttctccctcaaccttttcactcacgtcagaagaggttggggcaaaacaaaacaagcatgattgaagagcaggggaagcccacacaatcaggtgagccctgatgggggctggactggcctggtctggctgggaaaggattcttttaaaagcgtgcctgagcatctcagagcaatgtcagtgatgccaaagagagcaacttggcctccttgggcaccaactctgatggctgagttgcacaaacgtggctcagatgttggcatgcccgatggtgggaccttgttctctgataaagggcttaatctttccatgtagcaaagcaactttccctccctcccctccccccgaaccctgagcttgggcttgtgtgggcccagcatggctgtgcctgtgagggaagccacatcagtgagagaaagttgcattctctcaggggcctagattggcttggggcaggtgcttgttgaaaagcatgagtgtttctgctttgggaaacccttccagggctctggttggaaacttggccagtaaggacagggccttgggcctcccaaggagttcacaatgatgccaggaagggtccctgagcctgggttccagtcagcttggctaacagaatggggcttgggaattccaggggcaactgagcatccaccccattagccagtgatctggacagggacagctggctacagggaatcaaaggctgttctgtacagttttaccagaaactgtgaccttgggtaaggctcctcacttttctgggcctcaacttcctcatctgcaaaatcagagcattagctgctctccccatgattccctcccagttttaattaaaagtctctgatctggagcacatgagggttgcgagcctggtgcacctggttcctgtctccgtgggctggtttccttcagcccctgatgcccaggctgggtgcaggctctcatctggtccatgcccagatgctgcctcagacaagaactctgggaatcctaacagactctgctttcctctcttcgtggtttgtcctccctcttttattcttgtgtaatgatgagacataattaagggtcatctacaatggacaattttcaaggtgctgatgtgatgtcacaacctccgctacatcctgagtaagtcagtgtccccaacagcagatgaggctgggtctttcctcatttctgcttctgggatgacatcagtgggagagttgaagatctgagaattctaaaggaaatgttctctgatgggaggagagagggaacttatttcccttcaaagtagtttgcttcttaagaccactcctccctccagaatgtctttaaccagacatcatttcagaaggtggggcagctgcttccttaggaagagtgggcctgatagctcaaccaactcctttagcatgtaaactcacagaaggcaagaacccctttttttagactttccaaatgcatcctgcaaagagagagatagctgatagggactgacaagcacactgtttagataagaagcaattagccttttatatctgtgctctatacattttctatgtgcagcatctttcctaacttgttgtggttcccgggtggcaggtgcacagctgggagggactgccggctgtttcgtacaacattcttgccaattcccttgaggagaaaattcttcacatggcttctgcatgtacagtatttgggcagcaaaacatgattaaagtcagtttgaaaatgg

SEQ ID NO: 117 - DNA, 566 bp, Artificial Sequence
  PCP4
gccagaaccggtggagcagcgacccctgagcagtgttctctgtgctgagcggcgggactgagctgttgagttagagccaacatgagtgagcgacaaggtgctggggcaaccaatggaaaagacaagacatctggtgaaaatgatggacagaagaaagttcaagaagaatttgacattgacatggatgcaccagagacagaacgtgcagcggtggccattcagtctcagttcagaaaattccagaagaagaaggctgggtctcagtcctagtgggagaaccccctcctagtccacctgaaaacaccaaattcaaccatcatctgtcaagaaattaaaagaacaacaccctagagagaagtcatccacacacaatccacacacgcatagcaaacctccaatgcatgtacagaaacctgtgatatttatacccttgtaggaaggtatagacaatggaattgtgagtagcttaatctctatgtttctctccattttcattcctcctgcaactattttccttgatgttgtaataaaatgaagttacgatgagtgaattcaaaaaaaaaaaa

SEQ ID NO: 118 - DNA, 1260 bp, Artificial Sequence
  CFL1
ggccggcgggaagactccgttacccagcgagcgaggcggcggcgcagggccagcggactccatttcccgtcggctcgcggtgggagcgccggaagcccgccccacccctcattgtgcggctcctactaaacggaaggggccgggagaggccgcgttcagtcgggtcccggcagcggctgcagcgctctcgtcttctgcggctctcggtgccctctccttttcgtttccggaaacatggcctccggtgtggctgtctctgatggtgtcatcaaggtgttcaacgacatgaaggtgcgtaagtcttcaacgccagaggaggtgaagaagcgcaagaaggcggtgctcttctgcctgagtgaggacaagaagaacatcatcctggaggagggcaaggagatcctggtgggcgatgtgggccagactgtcgacgacccctacgccacctttgtcaagatgctgccagataaggactgccgctatgccctctatgatgcaacctatgagaccaaggagagcaagaaggaggatctggtgtttatcttctgggcccccgagtctgcgccccttaagagcaaaatgatttatgccagctccaaggacgccatcaagaagaagctgacagggatcaagcatgaattgcaagcaaactgctacgaggaggtcaaggaccgctgcaccctggcagagaagctggggggcagtgccgtcatctccctggagggcaagcctttgtgagccccttctggccccctgcctggagcatctggcagccccacacctgcccttgggggttgcaggctgcccccttcctgccagaccggaggggctggggggatcccagcagggggagggcaatcccttcaccccagttgccaaacagaccccccaccccctggattttccttctccctccatcccttgacggttctggccttcccaaactgcttttgatcttttgattcctcttgggctgaagcagaccaagttccccccaggcaccccagttgtgggggagcctgtattttttttaacaacatccccattccccacctggtcctcccccttcccatgctgccaacttctaaccgcaatagtgactctgtgcttgtctgtttagttctgtgtataaatggaatgttgtggagatgacccctccctgtgccggctggttcctctcccttttcccctggtcacggctactcatggaagcaggaccagtaagggaccttcgattaaaaaaaaaaaagacaataataaaaa

SEQ ID NO: 119 - DNA, 941 bp, Artificial Sequence
  RBP4
cgcctccctcgctccacgcgcgcccggactcggcggccaggcttgcgcgcggttcccctcccggtgggcggattcctgggcaagatgaagtgggtgtgggcgctcttgctgttggcggcgctgggcagcggccgcgcggagcgcgactgccgagtgagcagcttccgagtcaaggagaacttcgacaaggctcgcttctctgggacctggtacgccatggccaagaaggaccccgagggcctctttctgcaggacaacatcgtcgcggagttctccgtggacgagaccggccagatgagcgccacagccaagggccgagtccgtcttttgaataactgggacgtgtgcgcagacatggtgggcaccttcacagacaccgaggaccctgccaagttcaagatgaagtactggggcgtagcctcctttctccagaaaggaaatgatgaccactggatcgtcgacacagactacgacacgtatgccgtgcagtactcctgccgcctcctgaacctcgatggcacctgtgctgacagctactccttcgtgttttcccgggaccccaacggcctgcccccagaagcgcagaagattgtaaggcagcggcaggaggagctgtgcctggccaggcagtacaggctgatcgtccacaacggttactgcgatggcagatcagaaagaaaccttttgtagcaatatcaagaatctagtttcatctgagaacttctgattagctctcagtcttcagctctatttatcttaggagtttaatttgcccttctctccccatcttccctcagttcccataaaaccttcattacacataaagatacacgtgggggtcagtgaatctgcttgcctttcctgaaagtttctggggcttaagattccagactctgattcattaaactatagtcacccgtgtcctgtgaaaaaaaaaaaaa

SEQ ID NO: 120 - DNA, 2180 bp, Artificial Sequence
  MLLT11
ggcgcactgctcccctctggactgcggaggcactgcactgcgcgggacgtgggagggtgcctctgcagcccctcaaggccgccgcccctgcggggagaactggagaatgcggacacctagatgaggccctggcacccaagctggggcccccggaatctcacgttccctttactcgccaggcatttcggggcaaaacgaagcggagccccccaaacccccagacctaaccaagttcagagattcgcagaagcacgccccccaccccaaatttattgtgctctacccaaaatggaataggactaggtttatttacccattgtgagggtagagaggcgagtctggaggagcagggattgggagaaggggtggaaaaatactctgattcttaaaaatactttgtaacctaaagtccttaaattgtggaagaaaggaatactcctcctttccattgtagtctagagttaagatttcaaatccataaattagaggacctaaaattagagggcaattaactgctcattcattgggcccccagtcagcacgggggtgctggaagagatcgggaataatagcgcagaccaatgagcctagggagatgctttcatcgtctctccttccctcaagtgttctggaacctatcatttgaattagccgagtcaggcaggagggggcggggaatccttccgcccttcttaggaggggctgcattgcagggggagagtgaactgacagactcagtcactgaagagggaaaaggagtgagaagacaaagccgtcaaagccccaacagctttgtatttctccagcccggcgcagaccccggagctcccgaggcactccctccatctttggaacacgccagtaattgattgataacaggaagctatgagggaccctgtgagtagccagtacagttcctttcttttctggaggatgcccatcccagaactggatctgtcggagctggaaggcctgggtctgtcagatacagccacctacaaggtcaaagacagcagcgttggcaaaatgatcgggcaagcaactgcagcagaccaggagaaaaaccctgaaggtgatggcctccttgagtacagcaccttcaacttctggagagctcccattgccagcatccactccttcgaactggacttgctctaaggccaagacttctctctcccatcaccttgccctcattgtcttccctctcaagccccttcctttccactcctttcccattttaatcttgttctctccctactgtgttggtggtgctgatgaatctgccagagttgagttctatgtatttatttatctatctgtctactccatttctctcaaaagccctcaagtcacaaagtaaatggttcaagcaatggagtactgggtcacagggattcctcctttcccccccaaatattaactccagaaactaggcctgactggggacacctgagagtagtatagtagtgcaaaatggaagactgatttttgactctattataatcagcttcagagattccttaaaccttcctaatttcctgctccagggcagtaaacacaaatatttcttcaaggggtgatgaaaacctcggaagttttaatttgaggttatctgctacgaaacagtatttctaaaaggctaaagtgataagtctcttgcttttttttgatcctgctcttatattcttttttttcctcagagaaatcaggagggtagttagaggtataaaacaggaggaaatattatggaaaatgaaaatagggaaaataattgaatcattttagaagtagctaatttcttttctcaaaagagtgtcccttcttcacacctactcactttacaactttgctcctaactgtgggttgaaaactctagctaaagaaagttatcaaatcttaacatgcattcctactattatgatagtttttaaggtttcaattcaatcttctgaacggcataagtcctattttagccttacctcctgcatttgcaatacgtaatactgatcagtgggcacagttcttcagctacattgagaccctgaaatgaacaattatattctgactcgacatcttgtccccaatccttccaaaaatattgatggtgatttgtgctaccatttactcgtttatttaataaagacattcaatcccaggaaaaaaaaaaaaaaaaaaaaaaa

SEQ ID NO: 121 - DNA, 941 bp, Artificial Sequence
  CELA2B
cttacagaactcccacggacacaccatgattaggaccctgctgctgtccactttggtggctggagccctcagttgtggggtctccacttacgcgcctgatatgtctaggatgcttggaggtgaagaagcgaggcccaacagctggccctggcaggtctccctgcagtacagctccaatggccagtggtaccacacctgcggagggtccctgatagccaacagctgggtcctgacggctgcccactgcatcagctcctccgggatctaccgcgtgatgctgggccagcataacctctacgttgcagagtccggctcgctggccgtcagtgtctctaagattgtggtgcacaaggactggaactccgaccaggtctccaaagggaacgacattgccctgctcaaactggctaaccccgtctccctcaccgacaagatccagctggcctgcctccctcctgccggcaccattctacccaacaactacccctgctacgtcacgggctggggaaggctgcagaccaacggggctctccctgatgacctgaagcagggccggttgctggttgtggactatgccacctgctccagctctggctggtggggcagcaccgtgaagacgaatatgatctgtgctgggggtgatggcgtgatatgcacctgcaacggagactccggtgggccgctgaactgtcaggcatctgacggccggtgggaggtgcatggcatcggcagcctcacgtcggtccttggttgcaactactactacaagccctccatcttcacgcgggtctccaactacaacgactggatcaattcggtgattgcaaataactaaccaaaagaagtccctgggactgtttcagacttggaaaggtcacagaaggaaaataatattatataaagtgacaactatgcaaatcacaaaaaaaaaaaaaaaaaaa

SEQ ID NO: 122 - DNA, 838 bp, Artificial Sequence
  CSTA
tgctgtttgtggaaaataaagcattctataggcggagctagtgaacgcctcttttaaaacacgagtctccacacttccctgttcactttggttccagcatcctgtccagcaaagaagcaatcagccaaaatgatacctggaggcttatctgaggccaaacccgccactccagaaatccaggagattgttgataaggttaaaccacagcttgaagaaaaaacaaatgagacttacggaaaattggaagctgtgcagtataaaactcaagttgttgctggaacaaattactacattaaggtacgagcaggtgataataaatatatgcacttgaaagtattcaaaagtcttcccggacaaaatgaggacttggtacttactggataccaggttgacaaaaacaaggatgacgagctgacgggcttttagcagcatgtacccaaagtgttctgattccttcaactggctactgagtcatgatccttgctgataaatataaccatcaataaagaagcattcttttccaaagaaattatttcttcaattatttctcatttattgtattaagcagaaattaccttttctttctcaaaatcagtgttattgctttagagtataaactccatataaattgatggcaattggaaatcttataaaaactagtcaagcctaatgcaactggctaaaggatagtaccaccctcacccccaccataggcaggctggatcgtggactatcaattcaccagcctccttgttccctgtggctgctgataacccaacattccatctctaccctcatacttcaaaattaaatcaagtattttacaaaaaaaaaaaaa

SEQ ID NO: 123 - DNA, 1579 bp, Artificial Sequence
  NNMT
gaggaggtgcttgccagacactgggtcatggcagtggtcggtgaagctgcagttgcctagggcagggatggagagagagtctgggcatgaggagagggtctcgggatgtttggctggactagattttacagaaagccttatccaggcttttaaaattactctttccagacttcatctgagactccttcttcagccaacattccttagccctgaatacatttcctatcctcatctttcccttcttttttttcctttcttttacatgtttaaatttaaaccattcttcgtgaccccttttcttgggagattcatggcaagaacgagaagaatgatggtgcttgttaggggatgtcctgtctctctgaactttggggtcctatgcattaaataattttcctgacgagctcaagtgctccctctggtctacaatccctggcggctggccttcatcccttgggcaagcattgcatacagctcatggccctccctctaccataccctccacccccgttcgcctaagctcccttctccgggaatttcatcatttcctagaacagccagaacatttgtggtctatttctctgttagtgtttaaccaaccatctgttctaaaagaagggctgaactgatggaaggaatgctgttagcctgagactcaggaagacaacttctgcagggtcactccctggcttctggaggaaagagaaggagggcagtgctccagtggtacagaagtgagacataatggaatcaggcttcacctccaaggacacctatctaagccattttaaccctcgggattacctagaaaaatattacaagtttggttctaggcactctgcagaaagccagattcttaagcaccttctgaaaaatcttttcaagatattctgcctagacggtgtgaagggagacctgctgattgacatcggctctggccccactatctatcagctcctctctgcttgtgaatcctttaaggagatcgtcgtcactgactactcagaccagaacctgcaggagctggagaagtggctgaagaaagagccagaggcctttgactggtccccagtggtgacctatgtgtgtgatcttgaagggaacagagtcaagggtccagagaaggaggagaagttgagacaggcggtcaagcaggtgctgaagtgtgatgtgactcagagccagccactgggggccgtccccttacccccggctgactgcgtgctcagcacactgtgtctggatgccgcctgcccagacctccccacctactgcagggcgctcaggaacctcggcagcctactgaagccagggggcttcctggtgatcatggatgcgctcaagagcagctactacatgattggtgagcagaagttctccagcctccccctgggccgggaggcagtagaggctgctgtgaaagaggctggctacacaatcgaatggtttgaggtgatctcgcaaagttattcttccaccatggccaacaacgaaggacttttctccctggtggcgaggaagctgagcagacccctgtgatgcctgtgacctcaattaaagcaattcctttgacctgtca

SEQ ID NO: 124 - DNA, 835 bp, Artificial Sequence
  DKK4
cagacgacgtgctgagctgccagcttagtggaagctctgctctgggtggagagcagcctcgctttggtgacgcacagtgctgggaccctccaggagccccgggattgaaggatggtggcggccgtcctgctggggctgagctggctctgctctcccctgggagctctggtcctggacttcaacaacatcaggagctctgctgacctgcatggggcccggaagggctcacagtgcctgtctgacacggactgcaataccagaaagttctgcctccagccccgcgatgagaagccgttctgtgctacatgtcgtgggttgcggaggaggtgccagcgagatgccatgtgctgccctgggacactctgtgtgaacgatgtttgtactacgatggaagatgcaaccccaatattagaaaggcagcttgatgagcaagatggcacacatgcagaaggaacaactgggcacccagtccaggaaaaccaacccaaaaggaagccaagtattaagaaatcacaaggcaggaagggacaagagggagaaagttgtctgagaacttttgactgtggccctggactttgctgtgctcgtcatttttggacgaaaatttgtaagccagtccttttggagggacaggtctgctccagaagagggcataaagacactgctcaagctccagaaatcttccagcgttgcgactgtggccctggactactgtgtcgaagccaattgaccagcaatcggcagcatgctcgattaagagtatgccaaaaaatagaaaagctataaatatttcaaaataaagaagaatccacattgcaaaaaaaaaaaaaaaaaa

SEQ ID NO: 125 - DNA, 1753 bp, Artificial Sequence
  KRT7
cagccccgcccctacctgtggaagcccagccgcccgctcccgcggataaaaggcgcggagtgtccccgaggtcagcgagtgcgcgctcctcctcgcccgccgctaggtccatcccggcccagccaccatgtccatccacttcagctccccggtattcacctcgcgctcagccgccttctcgggccgcggcgcccaggtgcgcctgagctccgctcgccccggcggccttggcagcagcagcctctacggcctcggcgcctcacggccgcgcgtggccgtgcgctctgcctatgggggcccggtgggcgccggcatccgcgaggtcaccattaaccagagcctgctggccccgctgcggctggacgccgacccctccctccagcgggtgcgccaggaggagagcgagcagatcaagaccctcaacaacaagtttgcctccttcatcgacaaggtgcggtttctggagcagcagaacaagctgctggagaccaagtggacgctgctgcaggagcagaagtcggccaagagcagccgcctcccagacatctttgaggcccagattgctggccttcggggtcagcttgaggcactgcaggtggatgggggccgcctggaggcggagctgcggagcatgcaggatgtggtggaggacttcaagaataagtacgaagatgaaattaaccaccgcacagctgctgagaatgagtttgtggtgctgaagaaggatgtggatgctgcctacatgagcaaggtggagctggaggccaaggtggatgccctgaatgatgagatcaacttcctcaggaccctcaatgagacggagttgacagagctgcagtcccagatctccgacacatctgtggtgctgtccatggacaacagtcgctccctggacctggacggcatcatcgctgaggtcaaggcgcagtatgaggagatggccaaatgcagccgggctgaggctgaagcctggtaccagaccaagtttgagaccctccaggcccaggctgggaagcatggggacgacctccggaatacccggaatgagatttcagagatgaaccgggccatccagaggctgcaggctgagatcgacaacatcaagaaccagcgtgccaagttggaggccgccattgccgaggctgaggagcgtggggagctggcgctcaaggatgctcgtgccaagcaggaggagctggaagccgccctgcagcggggcaagcaggatatggcacggcagctgcgtgagtaccaggaactcatgagcgtgaagctggccctggacatcgagatcgccacctaccgcaagctgctggagggcgaggagagccggttggctggagatggagtgggagccgtgaatatctctgtgatgaattccactggtggcagtagcagtggcggtggcattgggctgaccctcgggggaaccatgggcagcaatgccctgagcttctccagcagtgcgggtcctgggctcctgaaggcttattccatccggaccgcatccgccagtcgcaggagtgcccgcgactgagccgcctcccaccactccactcctccagccaccacccacaatcacaagaagattcccacccctgcctcccatgcctggtcccaagacagtgagacagtctggaaagtgatgtcagaatagcttccaataaagcagcctcattctgaggcctgagtgatccacgtgaaaaaaaaaaaaaaaaaaaaaaaaaaaaaaaaaaaaaaaaaaaaaaaaaaa

SEQ ID NO: 126 - DNA, 2383 bp, Artificial Sequence
  MEOX2
gaaagcagttctctgggaccaccttcttttggcttcaacctctcccactcttgacatctgagtagctcagggaagctcttccaggtccgactgttcatatgtaaaggagactggccgctggggctcaggaccgggattatccgagctctgcagaagtgcaccgctattgctttgggaggttaaaaaaaaaatcacacggtttccagtgaaaaagtgacagagggtggtggcctttggaaccgccgtgaagtcttctgcctggaacccgaaacttgcatgctatggaacacccgctctttggctgcctgcgcagccctcacgccacggcgcaaggcttgcacccgttctcccaatcctctctcgccctccatggaagatctgaccatatgtcttaccccgagctctctacttcttcctcatcttgcataatcgcgggataccccaacgaagagggcatgtttgccagccagcatcacagggggcaccaccaccaccaccaccaccaccaccatcaccaccatcagcagcagcagcaccaggctctgcaaaccaactggcacctcccgcagatgtcttccccaccgagtgcggctcggcacagcctctgcctccagcccgactctggagggcccccagagttggggagcagcccgcccgtcctgtgctccaactcttccagcttgggctccagcaccccgactggggccgcgtgcgcgccgggggactacggccgccaggcactgtcacctgcggaggcggagaagcgaagcggcggcaagaggaaaagcgacagctcagactcccaggaaggaaattacaagtcagaagtcaacagcaaacccaggaaagaaaggacagcatttaccaaagagcaaatcagagaacttgaagcagaatttgcccatcataattatctcaccagactgaggcgatacgagatagcagtgaatctggatctcactgaaagacaggtgaaagtctggttccaaaacaggcggatgaagtggaagagggtaaagggtggacagcaaggagctgcggctcgggaaaaggaactggtgaatgtgaaaaagggaacacttctcccatcagagctgtcgggaattggtgcagccaccctccagcaaacaggggactctatagcaaatgaagacagtcacgacagtgaccacagctcagagcatgcgcacttatgatataaacagaggaccagctccattctcaggaaagaaatgttgtgatggcaagccttacccaaatatcgtttacacagagagatgactatggcagtgatgtttaatattattaaatccaggcatttcgaatctgtttttcatgatttatagagggtttacacaaagtgccacttattaaagagcttccacagtgaagatggagaaggtgaacttgctttgaatattccagatgtgtttggtcgtgcgtatggcagtgagcaggtatgtgtttgcttttgcttgcactgaaaattaaattgctatcaagagcaaactatgaacggttttttattcaagatgtctccagagtgaagatgccgaggatgaacttgcattgaacattccagatgtgtgagatcatgtgtattacagtgggcaggtatttgcttttgcttgcactgaaaattaaattgctatcaagaataaaccatgaaacattttatcctgaacagccacagtgcctgaattcactcaagtggataaaaagtgtattttaactctgtatatattacccttaagtcattttcctgtcttcactaatttagcaatgcattcatattagctgatgaaaataggcactcacaatgacaaccagagccagtttcttgtcttttttatacattttgtcatcccagagacaatcagtatgtgcttacctgtgttcaagtagagaaaaatacagtagagtctgataggacatattcttgtaccacagacaaaacaaatcttatgttgcatttactatcaactgctgctaatacgttattataaaacttacctagctcctgaattcttcctatcttatagcttaaaacaattaggatcataggcaaatcagttaccttgcagaaagagctttgtatgacagacattgtcttattttatttctgtaaaatattagctgtatgaatatgatttaattaacaagaaaacatttcttcctgattgacaacagtgttagacaaggtgcaaagcgaaactggttgctcaagttgatagaaaacaaaattctgaatatcttcaaattaaattcggtaaaaacacattattttttcatatgtgatgtattcatgcagaacaactatctttgtattttgtttttaaaatgtgtttaataaatgatcctttgtaaataaaaaaaaaaaaaa

SEQ ID NO: 127 - DNA, 3414 bp, Artificial Sequence
  CLCA3
tttgtttaacatgcaaaaatggtgttcagtctgaaggtgattctcttcctatccttgcttctctcgcctgtattgaaaagctcactggtaactttgaataacaatggatatgatggcattgtcattgcaattaatcccagtgtaccagaagatgaaaaactcattcaaaacataaaggaaatggtaactgaagcatctacttacctgtttcatgccaccaaacaaagagcttatttcaggaatgtaagcattttaattccaatgacctacaaatcaaaatctgagtacttaatcccaaaacaagaatcatatgaccaggcagatgtcatagttgctgatctttacctgaaatacggagatgatccctatacacttcaatatggacaatgtggagataaaggacaatatatacattttactccaaacttcttgttgactaataacttggctacctatgggcctcgaggtagagtatttgtccatgagtgggcccatctccggtggggagtatttgatgagtataatgtggaccagccattctatatttccagaagaaacactactgaagcaacaagatgttccactcgtattactgtttacatggttttgaacgaatgcaagggggccagctgtatagcacgaccattcagacgtgactcaaagacagggctgtatgaagcaaaatgtacatttatcccaaagagatcccagactgccaaggaatccattgtgtttatgcaaaatcttgattctgtgactgaattttgtactgaaaaaacacacaataaagaagctccaaacctatagaacaaaatgtgcaatcacagaagcacatgggatgtaatcatgagctctgaagattttcagcatttatctcccatgacagaaataaatttacctcgtcctacattttcattgctcaagtccaaacagcgtgtagtctgtttggtacttgataaatctggaagcatgaatgcagaagaccgtctctttcgaatgaatcaagcagcagaattgtacttgattcaaattattgaaaagggatccttggttgggttggtcacatttgacagttttgctaaaatccaaagtaagctcataaaaataattgatgataacacttaccaaaagatcactgcaaacctgcctcaagaagctgatggtggcacttcaatttgcaggggactcaaagcaggatttcaggcaattccccagagtaatcagagtactttcggttctgaaatcatattactaacagatggggaagattatcaaataagcttatgctttggagaggtaaaacaaagtggcacagtcatccacaccattgctctggggccgtctgctgacgaagaactggagaccctgtcaaatatgacaggattacataagggacactgatatactgaaagttcataaagtgctgggaagttcatcttttgaggacatcgtttttatgcccataaaaacataaatggccttattgatgctttcagcagaatttcatctagaagtggcagcatctctcagcaggctcttcagttggaaagtaaaactttgaatatcccagcgaagaaatggataaatggtacagtgcctgtggatagtacagttagaaatgatacttcctttgttgtcacatggacgatacaaaagccagcaataattcttcaagatccaaaagaaaaaaatatactacctcagattttcaagaaggtgaactaaatattcggtctgcccgtcttcgaataccaggtattgcagagacaggcacttggacttacagcgttcgaaacaatcataccaaatctcaattgctaactgtgacaatgaccactcgagcaagaagccctaccacactcccagtaattgcaactgctcacatgagtcaaaatacagctcattaccctagcccagtgattgtttatgcatgagtcagtcaagggtttcttcctgttctgggaatcaatgtaacagccattatagaaaatgaagagggacatcaagtaacattggagctctgggacaatggcgcaggtgctgattctgtcaagaatgatggcatctactcaaggtattttacagattaccatggaaatggtagatacagtttaaaagtgcttacccaggcaagaaaaaacacagctaggctaagtcaacaacagaataaagctctgtatgtaccgcgctatgctgaaaatggaaaaattatactgaacccatccaaacctgaagtcacagatgatgtggaaggagctcaaacagacgacttcagcagactcatctctggagggtcgtttactgtatcaggagtgcctcctaatggtaatcattctcaggtgttctcacctggtaaaattgtagacctcgaggctaagtttcaaggagatcatattcaactttcatggactgcccctggcaaggtcctcgataaaggaagagctgagagctacattataagaataagtaaacatttcctggacctccaagaagattttgataaagctgctttaataaatacttctggtctgatacctaaggagcctggttcagtagaaagttttgaatttaaaccagaaccttctaaaatagagaatggtacgacattctatattgcaattcaagccatccatgaagccaatgtcacctcagaggtttcaaacattgcacaagcaactaactttattcctccacaggaacccagcattcctgatctgggtaccaatatttctgcaatcagtttggcaatttttggattagctgtaattttatctatattttaaactagaaattatattagaactcaaattcaatgttatacatacttggtaaacatttatttaaaatttaatttactatacttattgtctattataaagctcattataatataaaagtgaagtacaaaagttgtaagtttcctaattacttgattaattaatactatttgagttattaaatgttaatcaaaatgagtatatcatttcctgtctttgaataatccactcattaatttttaatatgaaaagatatatatttgtacttgtaagcattttaagaaacatttttaaagtgtgctacaaattcatttggtgtactaacatcaaaatgtatccaagccatttaaaaaatatttatatatacatagtagcaaatagttttatagatttatttgtatcgcattttttattacaaatgaatatttcatgtttatataagctgtaatcaaaaaggactagtagtagtagtaaggaagtcaaatttgtttttttatcattgattataagtggtatatttgttttttgtcattgattaaaagtgattttagccctaggcccgaaatgactagcaaatatcattttctgtatgaattgtggaacatcacaataaaattatttctgtgctgatgctaaa

SEQ ID NO: 128 - DNA, 4433 bp, Artificial Sequence
  CD96
ttcctgtctacgtttcatttcctgggggcttgccaagtgataaacagacccaggcgtgtgtggtagagttcgggttttttagcacgaagtgggtggctggagtttgcttgaaaacatcaattgactttgtgatcattacagaaatgctggtgtaaggtgttcagaagacaatggagaaaaaatggaaatactgtgctgtctattacatcatccagatacattttgtcaagggagtttgggaaaaaacagtcaacacagaagaaaatgtttatgctacacttggctctgatgtcaacctgacctgccaaacacagacagtaggcttcttcgtgcagatgcaatggtccaaggtcaccaataagatagacctgattgctgtctatcatccccaatacggcttctactgtgcctatgggagaccctgtgagtcacttgtgactttcacagaaactcctgagaatgggtcaaaatggactctgcacttaaggaatatgtcttgttcagtcagtggaaggtacgagtgtatgcttgttctgtatccagagggcattcagactaaaatctacaaccttctcattcagacacacgttacagcagatgaatggaacagcaaccatacgatagaaatagagataaatcagactctggaaataccatgctttcaaaatagctcctcaaaaatttcatctgagttcacctatgcatggtcggtggaggataatggaactcaggaaacacttatctcccaaaatcacctcatcagcaattccacattacttaaagatagagtcaagcttggtacagactacagactccacctctctccagtccaaatcttcgatgatgggcggaagttctcttgccacattagagtcggtcctaacaaaatcttgaggagctccaccacagtcaaggtttttgctaaaccagaaatccctgtgattgtggaaaataactccacggatgtcttggtagagagaagatttacctgcttactaaagaatgtatttcccaaagcaaatatcacatggtttatagatggaagttttcttcatgatgaaaaagaaggaatatatattactaatgaagagagaaaaggcaaagatggatttttggaactgaagtctgttttaacaagggtacatagtaataaaccagcccaatcagacaacttgaccatttggtgtatggctctgtctccagtcccaggaaataaagtgtggaacatctcatcagaaaagatcacttttctcttaggttctgaaatttcctcaacagaccctccactgagtgttacagaatctacccttgacacccaaccttctccagccagcagtgtatctcctgcaagatatccagctacatcttcagtgacccttgtagatgtgagtgccttgaggccaaacaccactcctcaacccagcaattccagtatgactacccgaggcttcaactatccctggacctccagtgggacagataccaaaaaatcagtttcacggatacctagtgaaacatacagttcatccccgtcaggtgcaggctcaacacttcatgacaatgtctttaccagcacagccagagcattttcagaagtccccacaactgccaatggatctacgaaaactaatcacgtccatatcactggtattgtggtcaataagcccaaagatggaatgtcctggccagtgattgtagcagctttactcttttgctgcatgatattgtttggtcttggagtgagaaaatggtgtcagtaccaaaaagaaataatggaaagacctccacctttcaagccaccaccacctcccatcaagtacacttgcattcaagagcccaacgaaagtgatctgccttatcatgagatggagaccctctagtctcgtgagactttgccccatggcagaactctgctggaatcctattgagaaggtagacattgtgctttattaatatagtcgctcttcagccatgcctttgctgcagctgaaatggaagtcagaagtgagtgacctgttttcccagcaactcaccctcttccatctccaaacgcctgaagcttaaccaagagtgagaggatatgtcatgttcacactcaatgcaattcgtagtggttttcttgcttatgtaagaagtacatattagtctgccatctttaaaaaaaaatacagtattttcatttaaattctctgatggagggacaacaatggtttcaactgtatgcccatgcctgatcctcttatttgaacatctatcaacattgtaaactctttgccaaaatcctggggctttgctgcattccctaagataattacaggaaaaagaaaatgtaaaagtgctaacaaggctgccaagtaatggagaagtatggttagtcttcatattgaaattctgttgcttattttcatggaaggaaacagaatactttgcacaggaaccacattttcaatcctccttcactgtcttcctaccatgttcagcccagactcctgccacatggaccaggatgaagagggatcaaagagataattagccaaaaacccagtagcctagaagatacaaaactccactggcctctaaaattatattagccaagagtggtttcatttgagtgccttcgtgtgtatgtccatcaaactggaaccaaactgttttgtaagtaaacaggcagcctaagcccaaccctactttctaattccagttattctctttttcatctggggatttacctgttcatttaatctgcctgttttgatctgttttgaaaaagataaagagcctcaaatcagaccagcactgattaattaaccctgctcctaccaatcttttttaaagcagttgaagcagaatgtataggtgtcagagaagaaacctagtcagccagacgtgctctgtattcagcaatagtttgtgaatgaataaattactaatcctccttgtcgcttgaaaccttcccacactccctgctccaggagggaaaaacagatgttgttgacagatagagtgataggcaaattctgtgtggactttagtcccaaaaggaaactttagttcacttgcagtatgcttatccttgactgcacatgagaatgccttgtgcagagttatttggagattatgtctttttcttaaacaccatggctgtcacacttcagttcaattaaatcagaatgtctgaggagtgagacacaggcatcaacactctcaaatgattcacatgttcagccaaagttgagaaccatcgagcctgtggaagttctttctcatggctcagaatcttaggtaggtgcttaactcttgtggtggccagcctccaagatgagccccagtgttcttgcctcctactattcacatctttatgtggtcccctccaatgctgaatacagatgatttgtgtaacctgaggccaggattaaggggaggcaatcaatgcacctagggaaaaaatttaaggaggtattcacactcagggtcatgcacttgcacaatgttgagaatgagtaccactctcaccattggtatagccaaaaaagcttggaagtgaccaaggctaggtcacaaaatacactgtggcttcttctttgatctctctttgaccatactgacactgggaaaagcccattcccatgccatgaagacaccaaggcagccctattgagaaatctacctgtcgtggccgggcgcagtggctcacgcctgtaatcccagcactttgggaggccgaggtgggtggatcacgaggtcaggagatcgagaccatcctggctaacacagtgaaaccccgtctctactaaaaatacaaaaaattagccgggtgtggtgtcgggcacctgtagtcccagctactcaggaggctgaggcaggagaagggtgggaacccgggaggcagagcttgcagtgagccgagattgtgccactgcacactccaatctgggtgaaagaccgagactccgcctcaaaaaaaaaaaaaaaagaaagaaagaaagaaagaaagaaatctacctgtcaaggaactaaggtattttgctaacaagcaccaacttgccagccatgtaagggagccatcttggaagcagatcctccagcctccagtcaagtcttcagataattgcaacttcagttgatcttttgaccaagacctcaagagagccagaactacccagctaagccttttactaaatttctgaacttctaacactattagataataagtgcttattgtttaacaccattaattttgagtataatttgttacatagcgacagataactatacagctcaacaactagaaaaataaactgtttacctgccttaattatttatctttagttccttattagttctcaagaaacaaatgctagcttcatatgtatggctgttgctttgcttcatgtgtatggctatttgtatttaacaagacttaatcatcagta

SEQ ID NO: 129 - DNA, 798 bp, Artificial Sequence
  SMR3B
gccaacagaaatccattacaatatataagagctaagatttcttgtcccttttcacctttatttgccgtctttcaactggcaagagtcattttgaccagcagattaatcaactgtaagacagatcctcacacaaagaggcaactgaaaggatgaaatcactgacttggatcttgggcctttgggctcttgcagcgtgtttcacacctggtgagagtcaaagaggccccaggggaccatatccacctggaccgctggctcctcctcaaccttttggcccaggatttgttccaccacctcctcctccaccctatggtccagggagaatcccacctcctcctcccgcaccctatggtccagggatatttccaccaccccctcctcaaccctaaggtccaccactccatcctgatgccccaggttatccacagcctccttcccgaccaagaccctatccacctggacctccatttttccctgtaaattctccaactgatcctaccctccctactcctgcaccccaaatatgaacaactgcagcaggtgccaccaccaccacaaaagacaccactacccttgtaactactgcttctactacccaaaatatgaattccaacactgcttccaagagacatttacataaaattgcttccatttttggatgagaatgaaaaattccaaaagtgctgagctttggggagaaataatcttagaaagaaattgtagaaaaaacccatgcagacataacatttataccaatgaggcaaaaataaagaattgagcaccaaaaaaaaaaaaaaa

SEQ ID NO: 130 - DNA, 1486 bp, Artificial Sequence
  PNLIPRP2
gtgagtggaagctctggtgcagcatgatgctgcccccttggaccctcggccttctcctgctggccacagtcagaggaaaagaggtctgctacggacaacttggctgcttttctgatgaaaaaccatgggcaggaacccttcagcgacctgtaaaattacttccctggtcccccgaggacattgacacccgctttcttctgtacacaaatgaaaatccaaacaacttccaactaatcactggcacggaaccagacaccattgaggcttcaaacttccaactggaccgcaagacacgcttcatcatccatggcttcttagacaaggcggaggacagctggccatcggacatgtgcaagaaaatgtttgaagtggagaaggtgaactgcatctgtgtggactggaggcacgggtcccgggcaatgtacacccaagccgtgcaaaacattcgggttgttggggcggagacagctttcttaatacaagcactgtcgacgcagctagggtacagccttgaggacgtgcatgtcatcggccacagcctgggcgcgcacacggccgcggaggcgggcaggaggctggggggccgcgtgggcaggatcacagggctggatccagcagggccgtgcttccaggatgaacctgaggaggttcggttggatccatctgacgccgtgtttgtggatgtgattcacacagattcttctcccatagttccttccctaggtttcggaatgagccaaaaggtgggccatctggatttctttccaaatggaggaaaggaaatgcccggatgtaagaaaaatgtcctttcaaccattactgatattgatggaatatgggaaggaattggtggctttgtgtcttgcaatcacctaagaagcttcgagtattactcaagcagcgtcctcaaccctgatggcttcctgggctatccctgtgcctcctacgatgagtttcaggagagtaagtgtttcccttgtccagctgaaggatgccccaaaatggggcactatgctgaccaatttaaggggaaaacaagtgctgtggaacaaacctttttcctgaacacaggagagagtggtaactttactagttggagatataaggtatcagtcacactttctggaaaagagaaagtgaatgggtacatcaggattgctttgtatggaagtaatgaaaactcaaaacaatatgagattttcaaaggatccctcaaaccagatgcaagtcacacgtgtgctattgatgtggattttaatgttggaaaaatacagaaagttaaattcctctggaacaaacgtgggataaatctatctgagcccaaactgggggcttcccaaatcacagtgcaaagtggtgaagatgggactgagtataatttttgtagcagcgacactgtggaagaaaacgtcttgcaatctctttacccttgttaaaaacgtggtgcagctattgcggtaataaaatctttaatgcactcggaaaa

SEQ ID NO: 131 - DNA, 7986 bp, Artificial Sequence
  MTF1
ggaagtgacgttaggggaaggtgggggcaatcatggtgccgctggggaggggagaagctgctgctgccgccgttgccgggagccgcggagacaagtcattacgttttcatttctcacaactgggctgagcacaactgaaccatgggggaacacagtccagacaacaacatcatctactttgaggcagaggaagatgagctgacccccgatgataaaatgctcaggtttgtggataaaaacggactggtgccttcctcatctggaactgtttatgataggaccactgttcttattgagcaggaccctggcactttggaggatgaagatgacgacggacagtgcggagaacacttgccttttctagtagggggtgaagagggctttcacctgatagatcatgaagcaatgtcccagggttatgtgcagcacattatctcaccagatcagattcatttgacaataaaccctggttccacacccatgccaagaaatattgaaggtgcaaccctcactctgcagtcggaatgtccggaaacaaaacgtaaagaagtaaagcggtaccaatgtacctttgagggctgtccccgcacctacagcacagcaggcaacctgcgaacccaccagaagactcaccgaggagagtacacctttgtctgtaatcaggagggctgtggcaaagccttccttacctcttacagcctcaggatccacgtgcgagtgcacacgaaggagaagccatttgagtgtgacgtgcagggctgtgagaaggcattcaacacactgtacaggctgaaagcacatcagaggcttcacacagggaaaacgtttaactgtgaatctgaaggctgcagcaaatacttcaccacactcagtgatctgaggaagcacattcgaactcatacaggggaaaagccatttcggtgcgatcacgatggctgtggaaaagcatttgcagcaagccaccaccttaaaactcacgttcgtacacatactggtgaaagacccttcttctgccccagtaatggctgtgagaaaacattcagcactcaatacagtctcaaaagtcacatgaaaggtcatgataacaaaggacactcatacaatgcacttccacaacacaatggatcagaggatacaaatcactcactttgtctaagtgacttgagccttctgtccacagattctgaattgcgagaaaattccagtacgacccagggccaggacctcagcacaatttcaccagcaatcatctttgaatcaatgttccagaattcagatgatacggcaattcaggaagatcctcaacagacagcttccttgactgaaagttttaatggtgatgcagagtcagtcagtgatgttccgccatccacaggaaattcagcatctttatctcttccacttgtactgcaacctggcctctccgagccaccccagcctctactacctgcctcagctccgtctgctcctccgcctgctccctccctaggacctggctcccagcaagctgcatttggcaacccccctgctctcttacaacctccagaagtgcctgttccccacagcacacagtttgctgctaatcatcaagagtttcttccgcacccccaggcaccgcagcccattgtaccaggactttctgttgttgctggggcttctgcatcagcagcggcagtggcatcagctgtggcagcaccagccccaccacaaagtactactgagcccctgccagccatggtccagactctgcccctgggtgccaactctgtcctaactaataatcccacaataaccatcaccccaactcccaacacagctatcctgcagtccagcctagtcatgggagaacagaacttacaatggatattaaatggtgccaccagttctccacaaaaccaagaacaaattcagcaagcatctaaagttgagaaggtgttttttaccactgcagtaccagtagccagtagcccagggagctctgtccagcagattggcctcagtgttcctgtgatcatcatcaaacaagaagaggcatgtcagtgtcagtgtgcatgccgggactctgcaaaggagcgggcatccagcaggagaaagggctgctcctccccaccccctccagagccgagcccccaggctcctgatgggcccagcctgcagctcccagcgcagactttctcttcagcccctgttcccgggtcatcatcctctaccttgccctcctcctgtgagcaaagccgacaagcagagactccttcagaccctcagacagaaacattaagtgccatggatgtgtcagagtttctatccctccagagcctggacaccccgtccaatctgattcccattgaagcactactgcagggggaggaggagatgggcctcaccagcagcttctccaagtgaagggcccatgtgtgctcacctctgggaaaagcgggtgagcaggaggcatgaggtacaatgcctgccatcatgggtcagaaatttgaaggatgaagaaatctactgtttgaaatcctcacctttcagacgtattttctttattcacatcccaggagcatccattttaaggaactattctttggaaaaaaacaaaaaacaaaaaaaacaacaaaaaaagctaagttataagtgaactgtttggctgcactgtatgtcacttttgcttgttgtcatgtgaacttggaaactaaggttactcgtgtgcataaaaattctaaatgaaagggtgtggtttccatcaatctgatgctgcccatcgcttgcactggggtctttgtggatcgggcaggagttttcagtgtgttgggtgttgctccttcctatgtgtcttttgaatctgaggctgacatttgcttggaaggccagacccttgctccatcagagagggcagtggcaaaggccagtgaggcagctgtgagttggacagggttcaggtgagatggtgttgtcatttgtgcttagtgttggtggtgctcagggtggataacacgggtcgttctgcagcccgcttcagcacaaataggcagcttaaggcctggctcacaggctgtggggttgatctggctctgcagaggccctaggcagcttgttgactgctgtctgttgatgacgtgtgtgcaaagcaggctctagcaacatgatcactgtccttgccttcctggttctttctctcggttggttgccagggcttgcagatcgcagtgaattttccttggggaacatcgctgttttgtcctagagtgaacttgtggcttatggccagtgctgtttggtggtctgccttctttttaatggtattttcttcctcagagcagaagggctgcattttgcttatcagaagaaggtgcagatttaagggaattcatatgaggtggcatgtaattggcaggccaggtgtcctggttccaggttccagccaggctttgggttgccccctccatctctgcccccctctggattttgcatacagcctcatacagtgcaaacaaggatgtgacttgctcagcttagtcatgtgatttatttaaaaaaaaaaaaaaaagaaacacaaaacgatgatcttctactcagggtatagcaaaacaaaaaaattccctttccaccaaaaagcctgaaatgttgcaataagttatctcatttggaatgtttcattaagttgtgttataggaaaaaattgtgtgtgtgtgttatagaattatatccatatgtctgcctttggctccaagtcattgcctcttaaaataaaagatacaatccatactagcatgaaaagtttccctcaacaggctatattaacatagtcatgagtgctgaccaaactcaccgagctcagaggccaggcatggcctgaggtgcagaataggcctctgcctcccaagagccctttccttgccctgagcaaggagtggtgttccacaaacaaggctgctcttctaagccaacagtgtcaggcaggaagcagccataattttgccttgcattttcattccctaatgtaaagggatctgcattggtcactctcctgttctctgagccattgctcagggccagccaagatattattgagaacagataatttaccttggagccagaggccctccctgcctttagcaaggatgttcagggacagacaaagagggcagtggtggtgaatgttgttactgccatgaggagaaatggcagtaagaaatcttaactacaagcagccaatttctcattccaggaccctagccagaataattgacttctttttttttttgagacagagttttgcttttgttgccctggctggagtgcagtggcgcaatcttggctcaccgcaacctccacttcccaggttcaagcaattctgcctcagcctcccgagtagctgggattacaggcatgcgccaccacgcctggctaattttgtatttttagtagagacggggtttctccatgttggtcaggctggtctcgaactcccaacgtcaggtgatcctcccgcctcagtctcccaaagtgctgggattacaggtgtgagccaccatgcctggtctagggaattgacttctttttgaccttctgcactcccttccccaaaaggattgtggcttctgttgaccattgacctcagcagaagttgataaggcaggaggtttccagtcctcctggaaaaccaactgctgagcatgagttgtccttggctgtctctgggcctcgcacccatgggaagttttgaggtagggcccttgctgtttacaacttctgagagagtagtgatgggaccccaaagtaagcttgtatcagagggcagtaatgaccttcccatatccccatcctgtggtcacctgggatttgggttccctggggcggaagtgggaaataggagcccagggaaggacatctgaagcacccacagtttaaatagcgactcttcttggttagccagggctgtgctcatgttgggccctacccaggtcagtggccttttcactctcaaagatcgggggtgacgaagcagcatcttaaacagtgtttaggctgacagatttttccagttgaagaagctgaagtatctgccttttgagggtgactctagattacaagagagactatcagatccaatcagcttttgaaaaatcaggaatgtgcttaaaatgccagtgagtggttgtgaagatcaggtttatttcccaggataggcagtctttctttccctccttttccagttctcttttcctacctgtccttccataagcctggtctctagtgccgaggaccttggagaagagagggcccctagctaagctggagccagaaagaaccttcatggtgagtgtggtttcccaaacttgggaaatgaacctagggtgaggttagggaggatttgtagaattctagcaggtaaaaatcaagcctttttcccctcccatagtaaacttaaccattttcaccctgtacgttatcttctagctcctactaacatctccaattagacaaccgcttcaaagggtgcttagcaccagggattggggttcatggacttaggaggtggtaaggaaactggctggcaccaccaaactgccttagtgaacttggcccttcccaggcaggtaggttgggcattgagggaaggtggcccagtctttgctggcagggtctggccagtctcatgggggcaccaccagtttggtgacagaagtggtgtcatttattgaattccacctccgtttagaaggagatcatggtacaaagcccaggaggggccttaagatgtgaagatctctctgagtaaaaggcaaggggcttctcttcttcacctctgggatagttggtagatcggagagttttattttcagggtcaaggctgtggactgatggggatattggagggtgggtgggttttcctgagagactttgtataatgctgaatgtgtccagagggacaagtttgcagaacctcatattggtatattaaagaaataataaaataaaaaagcactttaggttattttatctttaacccgattgctgcaatttcttttgtgtgtatatatacatatatatactttccacaaagttttattttttgctcagaataaaaagttaaattgaggtgtgaaaagaaaagcacttaccttggtgcaatatgtgtagcttgatggtcgttgtcccatgtggccctggcctggcagcgtttttccgctcaatcagccctgtgctgtgagactgtccatagggaaacactattatgcattctcagcaaccgctcaatctatgcaagccttccctgtgtgccccagggcgccccctcaggctctctgaagaactgctgtgggtcctgttttctgctgactgttgaggccctttttcatcacttcttggtctctcgccatcttttccctcttcaccattacaaaatgatgcctgaaaggaaggaacagattgttcctaggtagaaacctggcaccttctagacttttatatttgtaatcacatccattgtccttaaagacttttccagagtgattgaaaccattgatttgtggaactgcaacaatatttctcaagagtttacaattgtcttacaccaccaatcagaaatatgtttggggaggcatgggtggcagggggcaacatgagccatttccatactgctccccatactacctgtgttggttccttaagcaaaaaggcctccagccttcattaaatcctataaacaaacattacatcccatgaatcattatcaactttcttcctttactccacctcccccattttatcttcaattctcaggctatagaatagacaagttttagaatatacttcagccaaagcagaaggattttcatagatccaatatgcaaatagttctgctgtgacatagatcagaaattgtctgttccttaatatttgggggtggaggcaacaaaactgaagcatatttctgattggttagccattttggcctgtttcctcttgcatgttttttagggagagagggaaacagtcctgtatttcttctgatgccctttggggaagccgacgaccactgggcatttctcactgttactcctgttcaagagagggcttctcagtctgcactgaaaaatgcaaattaaactggatctttatgtcaatgtgtacatagtacaagcttttttactggaattgaggtttaaaaccacacactgcccttttggtggtgtgcctgttgggccaaaaattgggtgataatgtagtgtcactttctcagctcaatgcagtttctactttttcttatgggaaaatttttcataaaacctttttgcaccaaaacccaggggtgttttttgcaatatccttgttatcctcgtagtgtgccaagtcagaggctttctcttgcccttttcctgctgtgttctcaggcctcccaagggctatttgactcaacagtctacatccttcgttgtgttttggagaatgtgggggtgggggtcagagttcaaggtgtctgttcccttttcctgtgaactctttctagtccctatttggggagggtggctggaaacagatttttgctgaatttctggctcagatcttctagccaggaaaggcaagagcccccaagagcccttttttttgacatacactaatcattggccggggtcttggtgacaacttttaaaatcccaaatagttttatttggattatgtaaaagtaagtgtgaaacatgggaacaacggacttccactgagcgatgtgaaaacgttacaggttcagtacttccaaaggaagaaacctccaaacccaaaaaagaataaatatgaatttgtatttttgaagaatgtgaaataatggtgtttgcttaattgctcattttgtataaacttaatattgtactttaaaatatctgctaaaaagtgaaaatttaactttttggaattgaaaaagcaatattaaatactaatgaaatcctaattaaatgcttatttaaatctggtaaaaaaaaaaaaaaa

SEQ ID NO: 132 - DNA, 1135 bp, Artificial Sequence
  S100B
gggcagagggaataagaggctgcctctgcccaccagtcctgccgcccaggacccgcagcagagacgacgcctgcagcaaggagaccaggaaggggtgagacaaggaagaggatgtctgagctggagaaggccatggtggccctcatcgacgttttccaccaatattctggaagggagggagacaagcacaagctgaagaaatccgaactgaaggagctcatcaacaatgagctttcccatttcttagaggaaatcaaagagcaggaggttgtggacaaagtcatggaaacactggacaatgatggagacggcgaatgtgacttccaggaattcatggcctttgttgccatggttactactgcctgccacgagttctttgaacatgagtgagattagaaagcagccaaacctttcctgtaacagagacggtcatgcaagaaagcagacagcaagggcttgcagcctagtaggagctgagctttccagccgtgttgtagctaattaggaagcttgatttgctttgtgattgaaaaattgaaaacctctttccaaaggctgttttaacggcctgcatcattctttctgctatattaggcctgtgtgtaagctgactggccccagggactcttgttaacagtaacttaggagtcaggtctcagtgataaagcgtgcaccgtgcagcccgccatggccgtgtagaccctaacccggagggaaccctgactacagaaattaccccggggcacccttaaaacttccactacctttaaaaaacaaagccttatccagcattatttgaaaacactgctgttctttaaatgcgttcctcatccatgcagataacagctggttggccggtgtggccctgcaagggcgtggtggcttcggcctgcttcccgggatgcgcctgatcaccaggtgaacgctcagcgctggcagcgctcctggaaaaagcaactccatcagaactcgcaatccgagccagctctgggggctccagcgtggcctccgtgacccatgcgattcaagtcgcggctgcaggatccttgcctccaacgtgcctccagcacatgcggcttccgagggcactaccgggggctctgagccaccgcgagggcctgcgttcaataaaaag

SEQ ID NO: 133 - DNA, 6038 bp, Artificial Sequence
  MYH1
gtctctcctcataaagcttcaagttctgatccactttaaggtcgcatctctacgccagggtccttaactgggctaccatcaataacctgcagccatgagttccgactctgagatggccatttttggggaggctgctcctttcctccgaaagtctgaaagggagcgaattgaagcccagaacaagccttttgatgccaagacatcagtctttgtggtggaccctaaggagtcctttgtgaaagcaacagtgcagagcagggaaggggggaaggtgacagctaagaccgaagctggagctactgtaacagtgaaagatgaccaagtcttccccatgaaccctcccaaatatgacaagatcgaggacatggccatgatgactcatctacacgagcctgctgtgctgtacaacctcaaagagcgctacgcagcctggatgatctacacctactcaggcttgttctgtgtcactgtcaacccctacaagtggttgccagtgtataatgcagaggtggtgacagcctaccgaggcaaaaagcgccaggaggccccaccccacatcttctccatctctgacaatgcctatcagttcatgctgactgatcgggagaatcagtctatcttgatcaccggagaatctggcgcagggaagactgtgaacaccaagcgtgtcatccagtactttgcaacaattgcagttactggggagaagaagaaggaagaagttacttctggcaaaatgcaggggactctggaagatcaaatcatcagtgccaaccccctactggaggcctttggcaacgccaagaccgtgaggaatgacaactcctctcgctttggtaaattcatcaggatccacttcggtaccacagggaaactggcttctgctgatattgaaacatatcttctggagaagtctagagttactttccagctaaaggctgaaagaagctatcatattttttatcagatcatgtctaacaagaagccagatctaattgaaatgctcctgatcaccaccaacccatacgattatgccttcgtcagtcaaggggagatcacagtgcccagcattgatgaccaagaagagttgatggctacagatagtgccattgaaattctgggctttacttcagatgaaagagtgtccatctataagctcacaggggctgtgatgcattatgggaacatgaaattcaagcaaaagcagcgtgaggagcaagctgagccagatggcactgaagttgctgacaaggcagcctatctccaaaatctgaactctgcagatctgctcaaagccctctgctaccctagggtcaaggtcggcaatgagtatgtcaccaaaggtcaaactgtgcagcaggtgtacaatgcagtgggtgctctggccaaagctgtctacgataagatgttcttgtggatggtcacccgcatcaaccagcagctggacaccaagcagcccaggcagtacttcattggggtcttggacattgctggctttgagatctttgatttcaacagcctggagcagctgtgcatcaacttcaccaatgagaaactgcaacagtttttcaaccaccacatgttcgtgctggagcaggaggagtacaagaaggaaggcattgagtggacgttcattgactttgggatggacctggctgcctgcatcgagctcatcgagaagcctatgggcatcttctccatcctggaagaggagtgcatgttccccaaggcgacagacacctccttcaagaacaagctgtatgaacaacatcttggaaaatccaataacttccagaagcccaagcctgccaaaggcaagcctgaggcccacttctctttgattcactatgctggcaccgtggactacaacattgccggctggcttgacaagaacaaggaccccctgaatgagactgtggtggggctgtaccagaagtctgcaatgaagactctggctctcctctttgttggggcaacgggagcggaagcagaggctggcggtggaaagaaaggtggtaagaagaagggttcttctttccagactgtgtctgctctcttcagggagaatttgaataagctgatgaccaacttgaggagcactcacccccactttgtgcggtgcatcatccccaatgaaactaaaactcctggtgccatggagcatgagcttgtcctgcatcagctgaggtgtaacggtgtgctggaaggcatccgcatctgcaggaaaggcttcccaagcagaatcctttatgcagacttcaaacagagatacaaggtgttaaatgcaagtgctatccctgaaggacaattcatcgatagcaagaaggcttcagagaagctcctggggtccattgacattgaccacacccagtataaatttggtcacaccaaggtctttttcaaagctggtcttctggggctcctagaggagatgcgagatgagaagctggcccagctgattacccgaacccaggccatgtgcagagggttcttggcaagagtggagtaccagaaaatggtggaaagaagagagtccatcttctgcatccagtacaatgtccgtgccttcatgaatgtgaagcactggccctggatgaagctgtatttcaagatcaaacccctcctcaaaagtgcagagacagagaaggagatggccaacatgaaggaagaatttgagaaaaccaaagaagagctggctaagaccgaggcaaaaaggaaagagctggaagaaaaaatggttactctgatgcaagaaaaaaatgacttgcaactccaggttcaagctgaagctgacagcttggctgatgcagaggaaaggtgtgaccagctaatcaaaaccaaaatccagctagaagccaaaatcaaagaggtgactgagagagctgaggatgaggaagagatcaatgctgagctgacagccaagaagaggaaactggaggatgaatgttcagaactcaagaaagacattgatgaccttgagctgacactggccaaggttgagaaggagaaacatgccacagaaaacaaggtgaaaaacctcacagaagagatggcgggtctggatgaaaccattgctaagctgaccaaggagaagaaggctctccaggaggcccaccagcagaccctggatgacctgcaggcagaggaggacaaagtcaacaccctgaccaaagctaaaatcaaacttgaacaacaagtggatgatcttgaaggatctttggaacaagaaaagaaaatccggatggatctagaaagagcaaagagaaaactagagggagacctaaaattggctcaagaatccacaatggatatagaaaatgacaaacaacaacttgatgaaaagcttaaaaagaaagagtttgaaatgagcggtctgcaaagcaagattgaagatgaacaagcccttggtatgcagctgcagaagaaaatcaaggagttacaagcccgcattgaggagctggaggaggaaatcgaggcagagcgggcctcccgggccaaagcagagaagcagcgctctgatctctcccgggagctggaggagatcagcgagaggctggaagaagccggtggggccacctcagcccagattgagatgaacaagaagcgggaggctgagttccagaaaatgcgcagggacctggaggaggccaccctacagcatgaagccacggcggccaccctgaggaagaagcatgcagatagtgtggccgagcttggggagcagattgacaacctgcagcgagtgaagcagaagctggagaaggagaagagtgagatgaagatggagatcgatgaccttgctagtaacatggagactgtctccaaagccaagggaaaccttgaaaagatgtgccgcgctctagaagatcaactgagtgaaattaagaccaaggaagaggagcagcagcggctgatcaatgacctcacagcacagagagcgcgcctgcaaacagaatcaggtgaatattcacgccagctagatgaaaaggacacactagtttcacagctctcgaggggcaaacaagcctttacacaacagattgaggaactgaaaaggcaacttgaagaggagataaaggccaagagtgccctggcacatgccctgcagtcctcccgccatgactgtgacctgctgcgggaacagtatgaggaggagcaggaagccaaggccgagctacagagagcaatgtccaaggccaacagtgaggttgcccagtggaggaccaaatatgagacagatgccatccagcgcacagaggagctggaggaggccaagaagaagctggctcagcgtctgcaggatgctgaggaacatgtagaagctgtgaatgccaaatgtgcttcccttgagaagacgaagcagaggctccagaatgaagttgaggacctcatgattgatgttgagaggacaaatgctgcctgtgccgccctggacaaaaagcaaaggaactttgataagatcctggcagaatggaaacagaagtgtgaagaaactcatgctgaacttgaagcttctcaaaaggaatcccgctcactcagcacagaactatttaagattaagaatgcttatgaggaatctttagaccaacttgaaaccttgaaacgggaaaataagaatttgcaacaggagatttctgatctcactgaacagattgcagaaggaggaaagcgcatccatgaactggaaaaaataaagaagcaagttgagcaagaaaagtctgaacttcaggctgccttagaggaggcagaggcatctcttgaacatgaagagggaaagatcctgcgcatccagcttgagttgaaccaagtcaagtctgaggttgataggaaaattgctgaaaaagatgaggaaattgaccagatgaagagaaaccacattagaatcgtggagtccatgcagagcacactggatgctgagatcaggagcaggaatgatgccattaggctcaagaagaagatggagggagacctcaatgaaatggaaatccagctgaaccatgccaaccgcatggctgctgaggccctgaggaactataggaacacccaagccatcctcaaggatacccagctccacctggatgatgctctccggagccaggaggacctgaaggaacagctggctatggtggagcgcagagccaacctgctgcaggctgagatcgaggagctgcgggccactctggaacagacagagaggagcaggaaaatcgcagaacaggagctcctggatgccagtgagcgtgttcagctcctgcacacccagaacaccagcctgatcaacaccaagaagaagctggagacagacatttcccaaatccagggagagatggaagacatcatccaggaagcccgcaatgcagaagagaaggccaagaaggccatcactgatgctgccatgatggctgaggagctgaagaaggaacaggacaccagcgcccatctggagcggatgaagaagaacctggaacagacggtgaaggacctgcagcatcgtctggatgaggctgagcagctggccctgaagggtgggaagaagcagatccagaaactggaggccagggttcgtgaacttgaaggtgaagttgaaagtgaacagaagcgcaatgttgaagctgtcaagggtctacgcaaacatgagagaaaagtgaaggaactcacttaccaaactgaggaagaccgcaagaatattctcaggctccaggacctggtggacaaactgcaagcaaaggtgaaatcctacaagagacaagctgaagaagcggaggaacaatccaacgtcaacctctccaaattccgcaggatccagcacgagctggaggaggccgaggaacgggctgacattgctgagtcccaggtcaacaagctgagggtgaagagcagggaggttcacacaaaaatcataagtgaagagtaatttatctaactgctgaaaggtgaccaaagaaatgcacaaaatgtgaaaatctttgtcactccattttgtacttatgacttttggagataaaaaatttatctgccaaaaaaaaaaaaaaaaaaaa

SEQ ID NO: 134 - DNA, 8482 bp, Artificial Sequence
  GREB1
aaataaagttttttcaatggaaggcttgcagctcttgaggacctgccaaatggaagaaggacagagacctggagccctatggaaagttctgacaccatgtgtggaaggacatggcttttaacacgtgtggtgactggagtagctgcagctgaggacagccaccctttcttcgtctctgctgagcgaaggctacacggcccttcctccttgcagctgtttcaccttctaccttgcgtggagccaggcttttgcaccgaatctgagatgccattttaaacagaagactccatcctcttgaagatgggaaattcttacgctggacagctgaagacgacacgctttgaagaggtcttgcacaattccatcgaggcatccctgcggtccaacaacctggtgcccaggcccatcttttcccagctgtacctggaagctgagcagcagcttgccgctctagaaggtggtagccgagtggacaatgaggaagaggaagaagagggagaaggagggctggaaacaaatggccccccaaaccctttccagctgcaccctctgcctgaaggatgctgtaccacagacgggttttgccaggccgggaaggacctgcgccttgtctccatttccaacgagcccatggatgtccctgcgggctttctcctcgtgggggtcaagtcccccagcctgccggaccatctcctggtgtgcgccgttgacaagaggttcttgccagatgacaatggccacaatgctcttcttggtttctctgggaattgtgttggctgtggaaagaaaggcttctgttacttcacggaattctccaatcatataaatctgaaactgaccactcaacccaagaagcagaaacacttgaagtattacctggtccgtaatgcacaagggactctaaccaaaggacctttaatctgttggaaaggctcagagtttagaagccggcagatccccgccagtacttgttccagttccctcttcccagccctggagagcacggctgccttccccagcgagcccgttcctgggacgaaccccagcatcctgatgggagctcagcaggcaggaccagcttctgatcacccctcactaaacgcagcaatgggtccggctgttttcaacggcaaagattccccgaagtgccaacaactggcaaagaataacctgttggccctgccgcgaccatcggctttaggtatcttgtcaaactccgggccccccaaaaaacgccacaaagggtggtctccagaatctccatcagctccagatggtggctgcccccaaggtggtgggaacagagctaagtatgagagcgcaggcatgtcctgcgtgccgcaggttggcttggtgggaccagcttcagtcacctttccagtggtggcctctggagaaccagtgtctgttcctgacaacttgctgaaaatatgcaaggccaagccagtgatatttaaaggccatgggaacttcccttacctctgtgggaacctgaatgacgtcgtggtcagccccctcttgtacacgtgctaccagaattcccagtctgtctcacgggcatacgagcagtacggcgcctctgccatccagcccatctccgaggagatgcagctcctgcttaccgtctactacctggtccagctggccgcggaccaggtgcccttgatggaggacctggagcagatcttcctgcgctcttggcgcgagtcgcacctgaccgagatccggcagtaccagcaggcgccgccgcagcccttcccgcccgcgcccagcgccgcggcacccgtgacctccgcgcagctgccctggctggccagcctggccgccagctcctgcaacgacagcgtgcacgtcatcgagtgtgcttactccctggccgagggcctctccgagatgttccggctgttggtcgagggcaagcttgccaagaccaactacgtggtcatcatctgcgcctgccgcagcgcggccatcgactcctgcatcgccgtcaccggaaaataccaagcccggattctttccgagagccttctcactcctgcggagtaccagaaggaagtcaattacgagctggttacggggaaggtagactcgctgggggccttctttagcaccctctgtccagagggtgacattgacattttgctggacaaatttcaccaggaaaatcaaggccatatttcttcctcactcgctgcctcttctgtcactaaagcagcatccctggatgtcagtgggacaccggtgtgcacaagttacaatctggagccacacagcatccggcccttccagctggcagtagcgcagaagctcctctcccatgtgtgttccattgcggattccagcacccaaaatctggacctgggatcctttgagaaggtggactttctcatttgcattcccccctcagaagtgacctaccagcagactctgctccatgtgtggcattcaggggttttgctggagcttggtctgaagaaagagcacatgacgaagcagagggtggaacagtatgttctgaagctagacacggaggcacagacaaaatttaaggcttttctgcaaaactccttccagaacccgcatacactttttgtcctaatccatgaccatgcgcactgggatcttgtgagtagcactgttcataacctctattctcaaagtgacccgtcggtgggattggtggaccgattgctcaactgcagggaggtgaaggaggcccccaacattgtgacacttcacgtgacctccttcccgtatgcactgcagacacagcacaccctcatcagcccctacaacgagatccactggcctgcctcctgcagtaatggagtggacttatatcatgaaaataagaagtacttcgggctgtcggagtttattgaatccaccctttcaggacacagcctccccttgctcagatacgatagctcctttgaggccatggtcactgcattaggaaaaaggttcccccgcctgcacagcgcggtgatcaggacctttgttctcgtgcagcactacgcggccgccctgatggccgtaagcggcctcccgcagatgaagaactacacgtcggtggagacgctggagatcacgcagaacctcctcaactccccgaagcagtgcccctgcggccacgggctcatggtcctgctgcgggtgccctgttcgcccctggcggtggtggcctatgagcggctggcccacgtgcgggcccggctggcgctggaggagcactttgagatcatcctgggcagtcccagctcaggcgtcaccgtggggaagcacttcgtaaagcagctcaggatgtggcagaaaattgaggatgtggagtggagaccccagacttacttggagctggagggtctgccttgcatcctgatcttcagtgggatggacccgcatggggagtccttgccgaggtctttgaggtactgtgacctgcgattgataaactcctcctgcttggtgagaacagccttggagcaggagctgggcctggctgcctactttgtgagcaacgaggttcccttggagaagggggctaggaacgaggccttggagagtgatgctgagaagctgagcagcacagacaacgaggatgaggagctggggacagaaggctctacctcggagaagagaagccccatgaaaagggagaggtcccgctcccacgactcagcatcctcatccctctcctccaaggcttccggttcagcgctcggtggcgagtcctcggctcagcccacagcactcccccagggagagcatgccaggtcgccccagccccgtggccccgcagaggagggcagagcccctggtgagaaacagaggccccgggcaagtcaggggccaccctcggccatcagcaggcacagtcccgggccgacgccccagcccgactgtagcctcaggaccggccagaggagcgtccaggtgtcggtcacctcgtcgtgctcccagctgtcctcctcctcgggctcatcctcctcatccgtggcgcccgctgccggcacgtgggtcctgcaggcctcccagtgctccttgaccaaggcctgccgccagccacccattgtcttcttgcccaagctcgtgtacgacatggttgtgtccactgacagcagtggcctgcccaaggccgcctccctcctgccctccccctcggtcatgtgggccagctctttccgccccctgctcagcaagaccatgacatccaccgagcagtccctctactaccggcagtggacggtgccccggcccagccacatggactacggcaaccgggccgagggccgcgtggacggcttccacccccgcaggctgctgctcagcggcccccctcagatcgggaagacaggtgcctacctgcagttcctcagtgtcctgtccaggatgcttgttcggctcacagaagtggatgtctatgacgaggaggagatcaatatcaacctcagagaagaatctgactggcattatctccagcttagcgacccctggccagacctggagctgttcaagaagttgccctttgactacatcattcacgacccgaagtatgaagatgccagcctgatttgttcgcactatcagggtataaagagtgaagacagagggatgtcccggaagccggaggacctttatgtgcggcgtcagacggcacggatgagactgtccaagtacgcagcgtacaacacttaccaccactgtgagcagtgccaccagtacatgggcttccacccccgctaccagctgtatgagtccaccctgcacgcctttgccttctcttactccatgctaggagaggagatccagctgcacttcatcatccccaagtccaaggagcaccactttgtcttcagccaacctggaggccagctggagagcatgcgactacccctcgtgacagacaagagccatgaatatataaaaagtccgacattcactccaaccaccggccgtcacgaacatgggctctttaatctgtaccacgcaatggacggtgccagccatttgcacgtgctggttgtcaaggaatacgagatggcaatttataagaaatattggcccaaccacatcatgctggtgctccccagtatcttcaacagtgctggagttggtgctgctcatttcctcatcaaggagctgtcctaccataacctggagctcgagcggaaccggcaggaggagctgggaatcaagccgcaggacatctggcctttcattgtgatctctgatgactcctgcgtgatgtggaacgtggtggatgtcaactctgctggggagagaagcagggagttctcctggtcggaaaggaacgtgtctttgaagcacatcatgcagcacatcgaggcggcccccgacatcatgcactacgccctgctgggcctgcggaagtggtccagcaagacccgggccagcgaggtgcaagagcccttctcccgctgccacgtgcacaacttcatcatcctgaacgtggacctgacccagaacgtgcagtacaaccagaaccggttcctgtgtgacgatgtagacttcaacctgcgggtgcacagcgccggcctcctgctctgccggttcaaccgcttcagcgtgatgaagaagcagatcgtggtgggcggccacaggtccttccacatcacatccaaggtgtctgataactctgccgcggtcgtgccggcccagtacatctgtgccccggacagcaagcacacgttcctcgcagcgcccgcccagctcctgctggagaagttcctgcagcaccacagccacctcttcttcccgctgtccctgaagaaccatgaccacccagtgctgtctgtcgactgttacctgaacctgggatctcagatttctgtttgctatgtgagctccaggccccactctttaaacatcagctgctcggacttgctgttcagtgggctgctgctgtacctctgtgactcttttgtgggagctagctttttgaaaaagtttcattttctgaaaggtgcgacgttgtgtgtcatctgtcaggaccggagctcactgcgccagacggtcgtccgcctggagctcgaggacgagtggcagttccggctgcgcgatgagttccagaccgccaatgccagggaagaccggccgctcttttttctgacgggacgacacatctgaggaagacagcggcgagttttctgaagagatgagtgctcagagccctcatgctgttgaggctaaagggaggcctggaacggtggggcgtttgactggaatggaccccagggactgtccaggtgcagcccctcctagtacacatgggcccccgaggccgtggtcctgggagccaggaagactccgcagtgggtgagaatgaaaacttgagactcccaagttctgggccagcccattgctctgggctgttttaaagcccatttcacgaggaacaaagatttacttcctgtcctgccattcgtgtgcttccatggacaaacctgatttttttctcttagttctaaagaatcttgggttattttgtagcggtgccagtatttcagtagatgggatttcagccaagtaggttcccctgtaacctcctacaaagcaatattccaaaggaacattttaactgtaaaggctggagacaagaaaaaataagtagatcgttttaataacaattatttaattgcctataagtttgctgtttcagaggctagcccaaaggcatcaaatttaataaagttaaacaaattgatttacttcagagcaaatatgatcctattaaaataatatagggtaaataccctacctcttagaaagggcaaaaatgcaaagaagctttctttaaaactaaaagggttttttggggggggagttggcggggaggaaataaggctaacagaggttgacctaaaattagccttacaaaggagaaaggaccacattgcttacttgaaacagacaatgaaaacaaccaaagtgatatataaaatagttgatgagaactagacttatgactgtagtttactagagtttagttttcagttgctgaagtagctcattttctcttactaatgtttggttcctcagggaagaatctcacttgactagagaggaggtgggaacagaagagagaaggaggcagggagatgtatttcttagggctcaccccttcacagactgacagaatggttttgttttgttttgttttgttttgttttgtttttgagatggactctagctctgtcacccaggctggagtgcagtggtgcgatctcggctcactgcaagctccgcctcccgggttctcaccattctcctgcctcagcctcccgagtagctgggactacaggcgcccaccaccacgcccggctaattttttgtattttttagtagagacggggtttcaccatgttagccaggatggtctcgatctcctgacctcgtgatccgcccgcctcggcctcccaaagtgctgggattacaggcgtgagccaccgtgcctgccccagaatggtttttaaagccacagttgagaggccacccattgcccggcgcctggacagtgatcatcttgttcatcttgttcagtcctttcttgtgtgattggaattattcatcccctttgaaagatgagaaggttgagatgcaaagagtctacctttccaagttctcactgctggaaagagctagaagcacagttcaaagttctggcttctggactctgcagtccaggtctcccttctcccacttgcctaccctcaatgccacactgtttttgaagtggcccataacttgaaggaaaagtttaaagacagttcaatttaatcatcagaatgcattcttttttttttcggagacggagtttcactcttgctgcccaggctggagtgcaatggtgcaatgacctcggctcactgcaacctctgcctcctgggttcaagtgattctccagcctcagcctcccgagtagctgggattatgggcgcccaccaccatgcccagctaatttttgtattttttttttttagtagagatggggtttcgccaggttggccaggctggtcttgtgaactcctggcctcaggtgatctgcccacctcatcctccaaaagtgctgggattacaggcatgagccactgcgcctggcctcagaatgcattcttacacatctatcctagacatttataagcactctaatggataacaatccaagaataaatgattgtaaaagatgatgccgaagagttgatgtcaatctttttttcctaagaaaaaaagtccgcgagtattaaatatttagatcaatgtttataaaatgattactttgtatatctcattattcctattttggaataaaaactgaccttctttaatcatatacttgtcttttgtaaatagcagcttttgtgtcattctccccactttattagttaatttaaattggaaaaaaccctcaaactaatattcttgtctgttccagtcttataaataaaacttataatgcatg

SEQ ID NO: 135 - DNA, 1615 bp, Artificial Sequence
  HDDC2
gaagtgggggaggaggaggaggagttggaaggggaggaggaagagggggagcaggaagaggggcagaaggaagaagaagagggggaggagaaagagatagaagagtaagaggagggggaagaaagacaaggggaaggggaggaggaggaggacggggaggagcttcgccgcggcctgctccgcccagccggggtcggtggccgcatggcttcggtctcctctgcgaccttctcgggccacggggctcggtccctactgcagttcctgcggctggtagggcagctcaagagagtcccacgaactggctgggtatacagaaatgtccagaggccggagagcgtttcagatcacatgtaccggatggcagttatggctatggtgatcaaagatgaccgtcttaacaaagaccgatgtgtacgcctagccctggttcatgatatggcagaatgcatcgttggggacatagcaccagcagataacatccccaaagaagaaaaacataggcgagaagaggaagctatgaagcagataacccagctcctaccagaggacctcagaaaggagctctatgaactttgggaagagtacgagacccaatctagtgcagaagccaaatttgtgaagcagctagaccaatgtgaaatgattcttcaagcatctgaatatgaagaccttgaacacaaacctgggagactgcaagacttctatgattccacagcaggaaaattcaatcaccctgagatagtccagcttgtttctgaacttgaggcagaaagaagcactaacatagctgcagctgccagtgagccacactcctgagacactctctaaattgctgcactcctgtaacaaacattatttttccatttcattgtattgtgttttgccattgttggtctgttgatttccctagatgtgagtctgtttgttttcaattgtctgaacttcagcaagaaatgtgatacaacttgggcactaaaagaagccacagaacaggaagcggtcatgaaagtgccatggatgaacactggaggtggcagtgcctgtttatgaactaaataaataaatattaaacacctaaaatattagaatatttattggagatttaaaatcatcttattctgacttaattaccgatatccccgaaggctaggttcattgaataatagaaaatttcattatgattgcttttaagaacagattcttcagctgatttagtgataagaatccagaaaagaaaatgtactagtgatgtattctctccccagatgaaattgctgccttattcagatttactctcttgagccagattttgaatttcactgcagactgcttcagacttctaatcataggcttgtaaacctactaataggctctgcccctcttcccaatactttttgtcatttagagatataaaccggggcatataaaaatgcaacttgtattcctttgtatatttttccctgtctgacttataaatcttgagacctttattgtaaaagcatgtatcatcaggtgagaaatataaataggaactggggtcattgagcctcaggtagggaatatatcaacccgatttcttcctctcttttcccttttataggataaataatcc

SEQ ID NO: 136 - DNA, 11687 bp, Artificial Sequence
  PSD3
aacaaagagcacgcggcgctggccgccggcactcgcgccctgaggctgcggccccggagcgcccggcggcggtttcggcgcgcggccgggctggcgatggaagatggaaggaaggagcgcagcggcagagacatttgtttgggtgaacaatgcatctgcacattcccagagtgttgccaaggccaaatatgaatttttatttggcagatctgaagggaaagctccagatactagtgatcatggaggaagcactttactcccaccaaatgtcacaaatgaatttccagaatatgggaccatggaggaaggtggagaaggcctaagggcttctctggaatttgatggtgaggctctgccatgccacccacaagagcagcagggtgtccagcctcttactggctgccactctgggctcgacagtgttacagaaggaccaaaagatgtcagagaggccccctctcaaagtcatctcaaggaacaaagtttacagcccattgactctttgatttcagctctgaaagccacagaagccagaatcatttccggaacattacaggctacaaaggtactggaccaagatgctgtttctagtttttcagttcagcaggtggaaaaagagctggacactgccagtcgtaaaacacagagagtcaacaaaacgctccctgctggccaaaaaaatttaccagaaatacctctttcagctgaagtaacaacggaggaaagtttttatttgagcatccagaaagatctcaccgcgctgttaactggagacactcaggcagagatttcccagataatgaataatgggaggaaaggggctgtctgtgtgcaggagccatcttgtcctttggcctccctcgggagctcagcagtgacctgccactctgcaggcagtgttggtttcttgaaagagcagaggtctgctcttgggagagagcacccagggggatgtgatcgaagcagctccatgggacgcccaggccgggtcaaacatgtggaatttcaaggagtggaaatactgtggacaggaggagacaagagagagacccagcatcctatagattttgagacatcactgcaaagaacagcctctcctgacagcaaagagtcttccaaagtgccacgccatctcatctcatcagctggtttgtgtaattcaagtagtttaactgagaatgtttgggatgaatcctggaaagctccttcagagaggcctggcactagctcggggacattttcccctgtgcgtcttgatgagagtggagaggatgaagtcttcctacaggaaaacaaacagcatcttgagaagacacctaaaccagagagagacagggaaaggatcagcgaacaagaggagcacgttaagggggaagatgaagacatccttgggcctggatatacggaggactccaccgacgtgtacagctcccagtttgaaaccattttggacaacacttctttatactacagtgcagagtccctggagacattatactcagagcctgatagctattttagctttgaaatgcccctcactccaatgatacaacagcgcattaaagaaggtggtcagttcttggagaggacatcagggggaggacatcaggatatcctgagtgtgtctgcagatggtggcatcgtgatgggctattctagtggcgtcaccaatgggctgaatgatgccagcgactccatctacacgaaaggcaccccggagattgctttctggggaagcaatgctggggtgaaaacaacacggctagaagctcattctgaaatggggagcactgaaattttggaaaaggagaccccagaaaatctcagtaatggtaccagcagcaatgtggaagcagccaaaaggttggccaaacgcctttatcagctggacagattcaaaagatcagatgttgcaaaacaccttggcaagaacaacgaatttagcaaactagttgcagaagaatatctgaagttttttgattttacaggaatgacgctggatcagtcactcaggtatttctttaaagcattctctcttgtgggagaaactcaagaacgagagagagttttaatacacttctccaatagatatttttattgtaacccagataccattgcttcacaagatggagtccattgccttacctgtgcaataatgcttcttaataccgatctacatggccacaatattggaaagaagatgacctgtcaggagttcattgcaaatctgcaaggggtaaatgagggtgttgatttctccaaggatctgctgaaagctctgtacaactcaatcaagaatgagaagcttgaatgggcagtagatgatgaagagaaaaaaaagtctccctcagaaagtactgaggagaaagctaacggaacacatccaaagaccatcagtcgtattggaagtactactaacccatttttggacattcctcatgatccaaatgctgctgtgtacaaaagtggattcttggctcggaaaattcatgcagatatggatggaaagaagactccaagaggaaaacgaggatggaaaaccttttatgctgtactgaagggaacagttctttacttgcaaaaggatgaatacaagccagaaaaggccttgtctgaagaggacttgaaaaacgctgtgagtgtgcaccacgcattggcatccaaggccacggactatgagaagaaaccaaacgtgtttaaacttaaaactgccgactggagggtcttgctttttcaaactcagagcccagaggaaatgcaagggtggataaacaaaatcaattgtgtggcagctgtattttctgcaccaccatttccagcagcaatcggctctcagaagaagtttagccgcccacttctgcctgccactacaacaaaactgtctcaggaggagcaactgaagtcacatgaaagtaagctgaagcagatcaccaccgagctggccgagcaccgctcatatccccccgacaagaaggtcaaagccaaggacgtcgatgagtacaaactgaaagaccactatctggagtttgagaaaacccgctatgaaatgtatgtcagcattctcaaggaaggaggcaaagagctactgagtaacgatgaaagcgaggctgcaggactgaagaagtcgcactcgagtccttcgctgaacccggatacttctccaatcactgccaaagtcaagcgtaacgtgtcagagaggaaggatcaccgacctgaaacaccaagcattaagcaaaaagttacttagagtccatctgcggccaggaagtgctggtcatggagcaaaatagggtttttcaagatctttctggtaatccgtgaatatatttaaaaaaaaaaagtctgtgacaaaacggtgcattagtaattttttctattgtatatttttgttagtttctgtacagattgtctttgctcttgatttcttttgctttgatgatttttgcaacttgatagctaatgcaccttttctgtgaggaggaggggatcgtgatttcagaatgaattatgtatcccttctcttttggttttctcttgtttgcagtctgctcagttgttttatgtattctcatatcaactgttaaacttttttttaaggttaaagaatttaatccattgtgaaacacttaactggacaaactgtagttttagtaaattctagctggagttaatatacgcctttatatgtgaaatcttgcccagtcacagaggtagaattgagcactcacagatgctccagtaagaatcacagtgctgggaatctagttgctccaatatgaggcagcttcatgtgcagcttagcacttgttgttgagatcggaccctgctggaagcagggaaaagaagcgtgaagatcgtaggattgagaacttagggaagcacattagcttgcttgaagtgctgattccatttcagccaagcaagggaaagaggaagtggagtcattttgcctttgaaggctgaggaaagattgatacccagttaattttgtttgctaaaggatgggggcaataatcggcccttgaggagctgcagcagtaggcatgtgctcagtctgcaggaattgttacctcactcccacagggtctagactagaaatccatcatctctatcgttgatatccttccatccaggaatagatttttcttactctacatatgtgtgtgtgcgtgcgtgtgtgtgcgtgtgtgggcatggggttgtgtcctggttgtgatattgaggtcttccttcctaacaaattaatactaaaatgaaacagcttttcttgtgtccttaagacaaaataaggaaggaaaacgtagctgcagttgtccacgatggatattggttctttaaaatatatctgaaagtagtagtcagaatgaattatggttggaaaactgaggaatcttctggttgcaggtgcaaagtgactttgtttattcttgtctcagtctccttgatagccacttcactctgctactactcaactttctcctaaaaatacttcatctattttcagtcctttctttctgtctactcaaaatggttctattaactttgcagtcatgagcttgttccagttacagtccctttgaagttcagggtgataaacagaatattcttctgtagaggaagagaaaggagtgaaagtttagcccactgagacctagagctttgtgatttcctaaccttgaaactctgtaatccctaaagttaaaatctccgcaagtggcacaacttcagaactaatagtatcactttgatttttctttttcctcccttagaaagtttctctagttctatagtttatttgttgaaggtactatgaccaaagaatcagctgctctacaggaatagcatggttccagtgaattagagaaaacctgctgtaaagccatggtagtgtctaagtggtatgttattatgatgtactagcatttatttacagaattatttattaacgtttacttccttcccctctgtaaatgtccatgactattgcccagagaaggcttacccctctctagggttgcagttgctttctttgtaataagtattttgccacacctgtaaaaaaaaaaacctcacttttaactctctgccttgtttgggtaaaggcagtaactaagtttatgtttcagaactgcaaaacaaacaggatagttaccaatatggcccatgtatcagattgatttttgtagcctctcactgaatccaacatatccacaagcaagttatctgtctttctacctgataatctaaattatcaggatatttgttttctgcctaaatgtttatactaagccgaggggagagaggtacctagaccatgtcatctacaagcttcagtaactaaagaaaaaggaacttccctgagtggcttgaatgtgtttgcccacagtctatatctatgtatatagaatgtctgtatgtattttacttatttaatatacattgaatggtaccttgctacagtatttctgacatttagagtagtgttgaaatactcggctagcatcagcaccactatagcactgtccgtgtcatatgagtcactaatattaactccagggacttctggataggctaatagatcattggatacgaagggctcttttgaagcttcagtataccatgtttgcatagtttatctttaaaaacaactttaaaggttcttttgtgagccaggatctcagactgccgtagcatgatgctgtccatctttagcgcatgggctgagaacacctcttccctgaggcttctgaaggttgctgtctgtcatgagtgcatgaaggaggccaagagtttatgctatgggaggaaacagtcactgatttgcctagattctgagagtctggcccatagccaaccacattttcctttgggataatttatttcctgtggcatctagccagaagaaattgaggatgtttcctttcacagctgctccaagcctgttgcccaattcacggtacaagggagcaccccttccctttcctctgaaggtacgccacccacctccgtcgcccacctcagcgcccaggagccttgggacttccttccatatgataaatcattcttcttcacgtcaatacacttcatattaatttctagtacagaaaatcttgacagctatcagaatgccttggtcatagtgttgttgcaaaattgaccatacaggtggcccatgtataaaatctgaattttaggggtttgtccccacctcgcatgctggcttttacagggaggtgtctgggattcctcattagcaatcaaaacttaattactgggatgcagagtccttactttatcgccagcccgtaggcatttctgaagtgcacttttttgaaacatcattttgctaactctcagcagtgtctaattaaactgagcaatacttttgtgaattttaattaatctcagcaaaaccatgatgggagagagtcctctgatggaaatgtagtccctggattatgtgtaacctttttattcctcttagatgcagaggatagaaagcattttttggtgcagtggtcttgtggcaaacacaagaccctctatgcgtctccaactgttatcctaatctagaaaatgaggactggcccctgggcaaaagtgacatgaggaatttactctggaagaggaaaatctgggtggctttccaaggctaagataggtttgtatttcaccctgtggccaagctacagaacttctgagattgtggaagaatttttgcaaccagcagggaaagaggcctcttactgcctaaacacaaagttacactgagcttttctactgtcctttgcctattgctccctctatcatgtaaagatctgggaaggatgagaggcagggcctgcttgtcatgagctgcactcttttctttttaactaatcattgacaattggaagaaaattgacgttaaagaagtttctccattgtcttactaacaaaaccttttgggtttcattaattgtccttgaaattgagttcctttggcatttttccttgcagtcatcagttaagcatgttgcatcctgaattcacagaagtttagctttgcaggtttgaatctctgtaatttaactcccgtggacttggtcgagttttcagcaggttgggagccacctctcttcatttcagcagtgagtcatcccttgacttttcaaatgacagaattttttccaattgtaaaattagcactgtaaaacaaagaaccaaagtggcatcctaagagttgttaaacctgaagtctagtttatgaggaattgtccaagttggagtttaaatagtatctgcttttgtctcaaagcatctaagttattctgacagaaaatggtaagtcagctttgcaggcagatgcgcctctgggcctcctaccttgctccacagctttctggccatcttgtctcccaggccatgccactgctctgccacatgtcagcaaatttctttccaccagtcttatagcatcttacatgatcaaatcatcacagaataaccccgtgatagattattgatagcaatagagaggggctttgtcactgatttttctctcagattccttttccatctctcatccataaaggaaggactgaaatccaaaggcattctccttttgtacctacagtatccagaacccacgtgggcagccttctgcttatgacaataattggcccattgcatgcagagagaatgtcttcatagagagaatgtcattaaatacttgaatctgcatgacagtttgacttgaatgcaacagcaggaaaattttgcaagttacataattgtatatacagtaggttttcttaagtctcttcggttcatcctttgtaatttgtgtgtgtatctgtagtattgcaggcttttggagactattcttacaggcagtatgtcagtcatcaaagaaaatgctgtcacctgccattgttgtatttgtgggtatttatagttgtatgtatgtaaatgcatcagtgtgtagattgcatatcagtgtatggtacatgtacatcaaaattatttttgtccttaatcagtgtgatatgaaaagcaagtacaacctcataggactgattatataatgaagttgttgagagtatatatagtggtattgttttattaaacttaaactcaaataatattttgattaaaatttttaataagactttatgctagaaaattctttgagctttgaatcaccagggcaaaaatgactttcaactaaccttgtgaatcttttgcagtgtactgtgtgcaataccaagggcatagctccctgtaatttgggaaatacagaaagaaaagaaaaaaaaaaaaaaaggcagcctgtgcagtcttagtaactttagtattaagagcacttaaagtcaaactgacaattttgggcttattacaaaatgtgatgctttaaagcacacgttctttattgttgttgtaattagtccataaaaaatatagctttcggaagaattaagtacccaccatatcatttatgtatttgtgtatgttttacgggagatcaaaccactctcgtggtgccgcatccgtactcgcttgacttggaagaaatatcacaagcactaaagtatatcagggcatcccaggattgggtactgtatcctaggtttgcagttgcagaaattagcatctagtgtcacaggtaaaagaatttcaggaccaggtttaaactttattttaaatatttttatacttaggtctctttttcctgcctctccccaaagaagagccactggccttagttgtttgagcttactgcttatattatagagtgtaaataggtaactagagactaaaattttattaaccagcatgtttggtatatttaaagcagtgactgagtgtgtttgagtgagtggctgagtgcagtgtcttttgtttaaacacactgcctcgtgtctttgtagctgattcagagagtttgaattgtggggtgggagactaacttcagctccaggctgcagtaatgtgttggtagttacacttgaggcatttttttgttgttgttaattaactctatagtctcaaactatttttgcaaatatatcatttttcctaattggttcttgacgtgcagtggactggctctgtgaatgattggcagggtcttagttttgcgagagtatttccttctaagaattattgtgatctgcagaaacagccatttgattcaaaaatcatgtagaaaaggagtaggagaagcaaaacgtttcatttttgggccttaaccatttgaaatgtttggactttaaacataaagccatggagtttataaagccaagtaaccatttgatatggataataatatctactctagagagagtatatatatgcacattgatttttaatgctgttaagatacttttgtaaaactgtaggaacaagagtaattagaccaaattgaagcttaggggacagtaaagtggttgctttccatttagggtaaccatgcatgtggttagtcctctcctcctgagattcagaaccagttgactgtccccttaggtgtataaggagaaaagttgacatgtctgggacctctgacatgtgtacacatgcttgcacacatgcacacacagtgaatgttttaagttatacaaacataagaccttaagatgcaaagagccagaatattctaaagaggtgatgaacagagggggtggaaactgcatcacagatgttttccaagggccagggtggaatctgagctctagtgtctgactttgagatgcattatatttttaacacataaatgaggggatccatatcacattctttcttgtggaccaccaaattgaaggctttcttgtaattcacaagcagcagctctccagcatctctccgtagcctgggtgaagtcccagaagctggtgtgcatcattttccaaggtggcagagctgcttgctctgcagatcattcctttgagagaggagtacaagtgaagaaacaaggaggcacttcctgtaggagcactgatgtgccttgtccacactcccctctgagctttactggtaagagagctccgactgaacatgctgagcagttgagcacttttccatcagcaacaacagcgaggatggaaatggaaaggaaccgaactaaaatgcatttccctttgcagggcagagagctaagctcttaggaatagtgttatagaaataagcaccctaacttcaattcctgaaaatgttggttaatggagagaattttggagtttcacttaatattttcccatcggtcgccataaataagtcttcaggcgctcctagaagagtcccagcccaaggctcgattaaggaccacactgcaggtctgaggctcactgctctgagtcctgaacaccagagccctgcagagagtggtgataacacatcatctctgcaaagaggaacctctcccccggccgccacttcactcaggcttctactgagcagcaaggacagcctgggtttcaaatgccacttcccctgctttagggatccaggtgtcctgatagcgtgaccctgctgaggcaaggtatcaactccgagagtgactgagtcactgagcgtggcacatgaacaaacgtcatgacaaagattctctgagtgaagttaacaccacgtattttacctttgcaaaaaacaaactggcaccctgagttctaactacggacggacgatatctttgcctccacacccagattcctggaaatggctaacgtttcctttctaggggaagggtcgaggaatactcaagtgctagcttagcagctttgttcagtccagatcagagctgttaggtaaaggcctaaccacctccctgcagtctcttatatctcaagctttaggaacccatttctaaatgtacactagcggagaatttatattgtcagccttgattaccataggacaggcagaaaggcgataatttgtatcttttaatataaaagaagcttttaacttttccagcctattataataactgagttatattcactgtggctcaaactaattggcattgtggaacatttctttaccttcaaagttttctccaccaatcatttcagttctattgcagtcctggtgccatatgtcccctgcaaattgtgaaagtaattagtgacaaaatagcagcctgctccttttcaatggcgaaactgtcggcattagcagttttgggtaagctggcggtactataacacgtactggaaacctgttcctcatcaccacctaccagattctggaaatgccgtcttctagaaaacgatggcgtttgtggtggtcttcttttgaaaggaacagtaatttgtgtggatattgttaaagtgtttaaagaatattttgacaattaagtttacattttacaattgctttattttttattaaaatagttgtatataaatattaccctatttcactgttgttcaagtaaatctaaaccttgtagacaagtgagtcatctgatatgtatagaagctgtgatatatagagtacatttattgtgtaaatgtttatgaatataattgttcctgtgtttttataagttggggatattttgttgttttacggcaacaaaatttattgcatttaaatggtttttatgtaatagaaatcacgcaaaatagtgaaggatttaaaatatgtatatgatacatgtaaatgtacaaactttagaaagaaataaatccaacaaatttcaatca

SEQ ID NO: 137 - DNA, 2331 bp, Artificial Sequence
  KRT6B
cgcctccagcctctcacactctcctaagccctctcatctcctggaaccatggccagcacatccaccaccatcaggagccacagcagcagccgccggggtttcagtgccaactcagccaggctccctggggtcagccgctctggcttcagcagcatctccgtgtcccgctccaggggcagtggtggcctgggtggcgcatgtggaggagctggctttggcagccgcagtctgtatggcctggggggctccaagaggatctccattggagggggcagctgtgccatcagtggcggctatggcagcagagccggaggcagctatggctttggtggcgccgggagtggatttggtttcggtggtggagccggcattggctttggtctgggtggtggagccggccttgctggtggctttgggggccctggcttccctgtgtgcccccctggaggcatccaagaggtcactgtcaaccagagtctcctgactcccctcaacctgcaaattgaccccgccatccagcgggtgcgggccgaggagcgtgagcagatcaagaccctcaacaacaagtttgcctccttcatcgacaaggtgcggttcctagagcagcagaacaaggttctggacaccaagtggaccctgctgcaggagcagggcaccaagactgtgaggcagaacctggagccgttgttcgagcagtacatcaacaacctcaggaggcagctggacaacatcgtgggggaacggggtcgtctggactcggagctgagaaacatgcaggacctggtggaggacctcaagaacaaatatgaggatgaaatcaacaagcgcacagcagcagagaatgaatttgtgactctgaagaaggatgtggatgctgcctacatgaacaaggttgaactgcaagccaaggcagacactcttacagatgagatcaacttcctgagagccttgtatgatgcagagctgtcccagatgcagacccacatctcagacacatccgtggtgctatccatggacaacaaccgcaacctggacctggacagcatcatcgctgaggtcaaggcccaatatgaggagattgctcagaggagcagggctgaggctgagtcctggtaccagacaaagtacgaggagctgcagatcacagcaggcagacatggggacgacctgcgcaacaccaagcaggagattgctgagatcaaccgcatgatccagaggctgagatctgagatcgaccacgtcaagaagcagtgtgccaacctacaggccgccattgctgatgctgagcagcgtggggagatggccctcaaggatgctaagaacaagctggaagggctggaggatgccctgcagaaggccaagcaggacctggcccggctgctgaaggagtaccaggagctgatgaacgtcaagctggccctggatgtggagatcgccacctaccgcaagctgctggagggcgaggagtgcaggctgaatggcgaaggcgttggacaagtcaacatctctgtagtgcagtccaccgtctccagtggctatggcggtgccagcggtgtcggcagtggcttaggcctgggtggaggaagcagctactcctatggcagtggtcttggcgttggaggcggctttagttccagcagcggcagagccactgggggtggcctcagctctgttggaggcggcagttccaccatcaagtacaccaccacctcctcctccagcaggaagagctacaagcactgaagtgctgccgccagctctcagtcccacagctctcaggcccctctctggcagcagagccctctcctcaggttgcttgtcctcccctggcctccagtctcccctgccctcccgggtagagctgggatgccctcacttttcttctcatcaatacctgttccactgagctcctgttgcttaccatcaagtcaacagttatcagcactcagacatgcgaatgtcctttttagttcccgtattattacaggtatctgagtctgccataattctgagaagaaaatgacctatatccccataagaactgaaactcagtctaggtccagctgcagatgaggagtcctctctttaattgctaaccatcctgcccattatagctacactcaggagttctcatctgacaagtcagttgtcctgatcttctcttgcagtgtccctgaatggcaagtgatgtaccttctgatgcagtctgcattcctgcactgctttctctgctctctttgccttcttttgttctgttgaataaagcatattgagaatgtgaaaaaaaaaaaaaaaaaaaaaaaaaaaaaaaaaaaaaaaaaaaaaaaaaaa

SEQ ID NO: 138 - DNA, 2450 bp, Artificial Sequence
  KRT6A
atatttcatacctttctagaaactgggtgtgatctcactgttggtaaagcccagcccttcccaacctgcaagctcaccttccaggactgggcccagcccatgctctccatatataagctgctgccccgagcctgattcctagtcctgcttctcttccctctctcctccagcctctcacactctcctcagctctctcatctcctggaaccatggccagcacatccaccaccatcaggagccacagcagcagccgccggggtttcagtgccaactcagccaggctccctggggtcagccgctctggcttcagcagcgtctccgtgtcccgctccaggggcagtggtggcctgggtggtgcatgtggaggagctggctttggcagccgcagtctgtatggcctggggggctccaagaggatctccattggagggggcagctgtgccatcagtggcggctatggcagcagagccggaggcagctatggctttggtggcgccgggagtggatttggtttcggtggtggagccggcattggctttggtctgggtggtggagccggccttgctggtggctttgggggccctggcttccctgtgtgcccccctggaggcatccaagaggtcaccgtcaaccagagtctcctgactcccctcaacctgcaaatcgatcccaccatccagcgggtgcgggctgaggagcgtgaacagatcaagaccctcaacaacaagtttgcctccttcatcgacaaggtgcggttcctggagcagcagaacaaggttctggaaacaaagtggaccctgctgcaggagcagggcaccaagactgtgaggcagaacctggagccgttgttcgagcagtacatcaacaacctcaggaggcagctggacagcattgtcggggaacggggccgcctggactcagagctcagaggcatgcaggacctggtggaggacttcaagaacaaatatgaggatgaaatcaacaagcgcacagcagcagagaatgaatttgtgactctgaagaaggatgtggatgctgcctacatgaacaaggttgaactgcaagccaaggcagacactctcacagacgagatcaacttcctgagagccttgtatgatgcagagctgtcccagatgcagacccacatctcagacacatctgtggtgctgtccatggacaacaaccgcaacctggacctggacagcatcatcgctgaggtcaaggcccaatatgaggagattgctcagagaagccgggctgaggctgagtcctggtaccagaccaagtacgaggagctgcaggtcacagcaggcagacatggggacgacctgcgcaacaccaagcaggagattgctgagatcaaccgcatgatccagaggctgagatctgagatcgaccacgtcaagaagcagtgcgccaacctgcaggccgccattgctgatgctgagcagcgtggggagatggccctcaaggatgccaagaacaagctggaagggctggaggatgccctgcagaaggccaagcaggacctggcccggctgctgaaggagtaccaggagctgatgaatgtcaagctggccctggacgtggagatcgccacctaccgcaagctgctggagggtgaggagtgcaggctgaatggcgaaggcgttggacaagtcaacatctctgtggtgcagtccaccgtctccagtggctatggcggtgccagtggtgtcggcagtggcttaggcctgggtggaggaagcagctactcctatggcagtggtcttggcgttggaggtggcttcagttccagcagtggcagagccattgggggtggcctcagctctgttggaggcggcagttccaccatcaagtacaccaccacctcctcctccagcaggaagagctataagcactaaagtgcgtctgctagctctcggtcccacagtcctcaggcccctctctggctgcagagccctctcctcaggttgcctttcctctcctggcctccagtctcccctgctgtcccaggtagagctgggtatggatgcttagtgccctcacttcttctctctctctctataccatctgagcacccattgctcaccatcagatcaacctctgattttacatcatgatgtaatcaccactggagcttcactgttactaaattattaatttcttgcctccagtgttctatctctgaggctgagcattataagaaaatgacctctgctccttttcattgcagaaaattgccaggggcttatttcagaacaacttccacttactttccactggctctcaaactctctaacttataagtgttgtgaacccccacccaggcagtatccatgaaagcacaagtgactagtcctatgatgtacaaagcctgtatctctgtgatgatttctgtgctcttcgctgtttgcaattgctaaataaagcagatttataatacaata

SEQ ID NO: 139 - DNA, 12815 bp, Artificial Sequence
  FUT9
gcggcagtagctgtagcagcttcagcgaagccggagatgggcagagagcgcgcgcggcgcagcagctccagattcactgctctcccctgcagctccccgcgcccccgccgctgtcgctgcctcggtgtcccccagccccagtcgcgctcttaggacagcgccgccaccgccgcctggccctgcctgcctcctgcgccgcgcagccctcgcgagcgccccggatggcgctttacccctaggaccgatttagaatgtaataactcaaggatttgataatacagtgaagtagtataacaactgtctacgtgcttcccatgatatgttctctatattgaaaaattatgacatcaacatccaaaggaattcttcgcccatttttaattgtctgcattatcctgggctgtttcatggcatgtcttctcatttacatcaaacctaccaacagctggatcttcagtccaatggaatcagccagctctgtgctgaaaatgaaaaacttcttttccaccaaaactgattattttaatgaaactactattctggtgtgggtgtggccatttgggcagacctttgaccttacatcctgccaagcaatgttcaacatccaaggatgccatctcacaacggaccgttcactgtacaacaaatcccatgcagttctgatccatcaccgagacatcagttgggatctgacaaatttacctcagcaagctaggccacccttccagaaatggatttggatgaatttggaatcaccaactcacactccccaaaagagtggcattgagcacttgtttaacctgactctgacttaccgccgtgattcagatatccaagtgccttatggcttcttgacggtaagcacaaatcccttcgtgtttgaagtgccaagcaaagagaaattggtgtgctgggttgtgagtaactggaaccctgagcatgccagagtcaagtattacaatgagctaagcaaaagcattgaaatccatacctacgggcaagcatttggagaatatgtcaatgataaaaatttgattcctaccatatctacttgtaaattttatctttcctttgaaaattcaatccacaaggattacatcacggaaaagctatacaatgcttttctggctggctctgtacctgttgttctgggaccatctagggaaaactatgagaattatattccagcagattcattcattcatgtggaagattataactctcccagtgagctagcaaagtatctgaaggaagtcgacaaaaacaataagttataccttagttactttaactggaggaaggatttcactgtaaatcttccacgattttgggaatcacatgcatgtttggcttgcgatcatgtgaaaaggcatcaagaatataagtctgttggtaatttagagaaatggttttggaattaaaatttttcatcacttgcacacttgataaatattttgatgagatatcatccaagtattgaggataagaagagatgcaacatactacttttgtgtcacaatttatttttatcaccctctctagggtaacgtgtatattttggtggagatttttaaaagctcagcatgagcaatcattccattcggttttaaattatcctgtatatacctaattatgtgcactggagagtaatttattcttcattatcatttgtaaacattgttttttcacatttttgtagttgtccataatgtaagcttgtggtttgattattgtttccacactgatcagctgtttaatctatttgggaaatgaagatgcacatcttaaagtatgaaaaattttcactaagtattacaatgtctagttccaactttgcatactataacagaggaagaacatgttgcgattgaattctaacctctttgactccgaagatgaatgaagtgtataactgtctctatttgatctattttttttacctgtttatcacatttgtgaaggtgaaattattcatggagtgaataagaaagatatgaagcagaactgttctattcgggaagctattagacttctcatttattttcattaagctgatttgcagctacttattctcatggtcttaaattaaattattcaagtatttttaaatatccaatttgttgtgattttcagcacctgggaagtaatcccaataatactttagaaaatctaagacagttctttctgctactgatgacactcattgtcataataaaacaaataatttcctcaaataacaaagaaaaatgatacctataaatatatttataaatggtgtcatttatgaacaatgtttaattatgtatcaatttaagatttttttctgaagccctaatatttaaaatggtcttattttaccatatggatataagatttggctcataatgatgagccctatcatttgatttgagttctatcatttaagagagcctaaataaaattatcatcaaggtattaaatataagacgttaaatataataaagtggggatatatagaaaacacacagtgttagcacacagtaagatctcaatgcacatttgttggatgaataaataaatgcaattgaattcccagaaaaatgattgtttcaaggaagtgacagttctactttagaagtactaattggagatgacttttatatcccattttggtaattattcatacatagcacatatgaccatgatgttcagggctttatagaaccaaataaacctaccattacatgaaaattttgaagagtatattcctgaacttgcagctgcctatagcattctcctccataaggctagaggagagctggatataagcagagatcgtaggtgaaaaaagatgggccattaaggattcttcaaggaaaacattcctcaaaatgatctttagtgcctttattcctttcaggccaataatccacccaaaaattagaatgttctgagacatccatttgggtctatttgtgacttattcgtattacaaattgacatcagcaaaattcaaaaagaattcagtaaaaagggcatagatccagctatccagactatcttgtgagagaataagctcaccccagcaccagaaagatttgagcagaggaatattcctgtaatgaatagaggattgtttgattctcaggtatatttcttaagccaagattgaatgcagtgtcaggcactgccttaacacccacagagataagatgaacaaggtactatcactgcctaaaatgagcttacaattaagtggatagacatataaaagcttcctttcaattcagcctgagactgtttatatgcatgtgctactccgaatgacgtttgtatgggtcaatgctgatttaatggggaaaaaaagtagaaaatttccccaattgcttagctgtttgacatgtttctgagctgcaaactttgtcaactcttttgacccaacatattattctctccgtattatctcttctaaccacaatgcattaagaaataatatttttatgtggatgtcctcctcaataagtaaagatctccatccatatttaattaattggtaagacagtcaaattcatacatttacatttactttgtcaaattttttggtctataaaaagcatagagatctaaagaggatacactgctaacaagtttagaaagcacctgcttttttttattattattatttttgtgatagagtcttgctctgtcgcccaggccggagtgcagtggtgcagtctcggctcactgcaacctcggcctcccaggttcaagtgattctcctgtatcagcctcccgagtagctaggattacaggcgtgtaccactatgcctggctagtttttgtatttttagtagagatgggtttcactgtgttggccaggctggtcttgaactcctgacctcaaatgatccacttgcctcagcctcccaaagtgctgggattacaggtatgagccactgtgtctggcccacctgttttttttgaaggcagaaaaacattcaatattaaaagcattcaatattatttcaacctgccttggctctagtgaatgttcatgatttgaaagaactgaaagacctaaaggcagtgtctctattgttgactacaaatgtaggctctttgttggactatgactataatcacacactgataatatgacgcaagtagaggcagtactactaagtatctagcaggtgctttgaaaccccattactaagtcccagaagactgtttcctaaatttgaagtggaagaattaaatgactcaatggaaccctttagctgtgggtccattgatgtgtgagttttagagctggaaggaattataattttgttgtttataattgctataatatagaaattataattgcttttctttctacttatgagttaactagatccagagatatttattcaagacacacattcacacacacatacacacacacacacacacaccccacagctagtgacaatagttaagatttggatttaaggatcctatctttctttatcccactttcttttcaatcgcattcataacttattatagaattatgtctcaatttttacaaatgtgaatgtcttattggtatttttagggcctatagaatggtacacctcatgtagaagaacttcgacttttgaaggtatacaataaataaaacatcaaacttgttagcattcgttctggtttaaatattttaggagttgagttcagcagaaggaaatgggctatcactacatttaagtgaaatacaaccctcaagaaagtgtatggttcacagccactcctttaataaatcctgtgggttgcaattctttgtaagaaactcatgaaaaagatatattgattcaacaaaattggtttgctgttgattatacaaaccaataattatgcctagaattaaattgtggacacaaaaaagggaacagaccatttaaaatgttttatttcaaaatatcgaaaagctattaccttcaatactctaaatatttaaatattaattattgtagacatcagtaagaataaataaatgttaatcattatagaccttactaataagaatatatactgaattgtccacatccagagtattacaccctgaacaagaaagacatgagagcctgacagtcatatatattatgacagctgtatatctgacaatatgaagtagaaactgaaaaaaaaaatcatcttagtgggaaacaaatacatgcttaaaattgttatatttactgtaaaactcctgataatcttagattgtgcagaaatgtttcttattttgaggggcttagaaagctcagcgcatttgatgtataaagcaacagaatatttaggaattatttgcggaggctttaaattcttacctccaattggaggttaaatattaaaagaataggaaactatgcctctgatattttttttgtcagcctatttttaaactagattccatgagtcttaaggtaatatcctagaattttttttttgcgtgaattaaagttaccacaaatttcaggtccttaccttatgactgtgtttgatcatatctttgagttcccttgaactctgatctcattttgagaaacattttgagaaacttcttaacaattacaatcgagctgttaaatataacaaacatcagaatctaaaggataagcacagtgcctaatgtacaggagggtcatatcaaatacttgttgaataaatacatgaatgtgataagtggtcctgtaaaatattttttaagagtagtgacaatgtttattggtaccaattggagatgatattttatatttattttgttagtttgtcacctggatgcaaaaggaaggcattttaattcctttctatcttacaacattgtaaagcatcaaaagaagtaacatctcaagaaagattagaaaggatttggatcacgttaacattctatgcaaatattagtaacatatcaactgtttctaaaaggaaagaaaattagtatttaaggagagtataaagtgcgagcactgtgaagggcagatatctattaccaaaccacatggagagaaatatagtctctctcctaacttcattccattgtattgcaatcagtcaattaaggtgattttttttttctggatgtctcaatctagagattttgtagcattttgcaaatgggtatgcttcactactatccacagtgttctcccctttagtaattcatattgaatatatccatattcatatgcattttataaaacagttaacagaatctaaataagatatagccggctaaatctggaatgtgagtgctaccctaggttattagttcaacaaactaattttgagagagccacttaacctctctggaccttgtttgtaagctttcttctagcactattactcttatctaagatcgaaattgatatatgcatgaaattcctaatggaatttcaatgtccatctcaaagtaattttttaggatattccatacagatttccttctcatttctctgtgtagatatttaaagtatgaaattgattatttaaactaatatgtggaaagaacctaatccagagcttggaatatagaaagtgctcaattaactgacattcctcctgtatttcctccctccccttagttgtctatgacttttgaactcactgctcactgacatcttaattgcctgcagaaaaatcaatcatattttaggcattattttgaaatattttagagttttctgtactattcaaactcttattacaaaaatctaaagatatttattgatgcaaaaaatttagggagtcattggaaatacctgaggcaatcccaggctaacaataaaatagcataattttaagtaagctagattgagttcatttgaacatttagttattttttagctcatagttaacatatgtccatgcatttgatttactttaaaaatattttatttaaaaataacctctcaaacaccagttgctttctgtcagttttactcaaagcatgcttcctaggtcacctgacctagaatcaccagaagtgttaacaataccgatttctgggctttgagccatgaaattagaatttcttcaaataatccatgcccccccgtcacccaaaaaaagagcatgcttttaatacatttccaaaattatcctgtttctgctataactggtgaaccatcctgtcctaaactagcagttctcaaacatgcatatgcctttgaaacttcctagatcatctacataaaaatcatttgaaatattgttaataatacacagcttctgaatctctgggtgtgagatgggaccaggaatcttattttaaaaatctccccagatggttctggtgtcctgctagttttgaggttttcatcccacctgtttagatgggtagtattctattaaatatgaggtattacctttctttagttcacctggaatcttcttaaatatatcggtaaagtattctacttcaaaatccaagacattttgtatacctaattatttcacacaagagcgtggaactcaccagtcttgtgacttggggcaggttatttatagtctccagacactttttccagttgcgagttgcttatagtagttcgcgaacctgaatgcacattagaaccatctggagaggctttaaaattgcagatgtccaaaccccacctccagagagctgatctatttagtttgaggaagagcccagaagtctaacaggtgtaaatgttccacaggtaatactaatgcaggcatacctcaggaaatcaccagttctcgtcttggaggaactattaggaaaataaaagattatatatcttgaaaaaaatctctaatttgctttctaggttctaactgcatgtttatattttgcaacaggaaagactggtctagacaattactaggatatatgcttctgtgatctgcttttctattgtatgtgtttaagagaccacattcttgggttccaaagtctccttgtctgataggtaatttgcaattgagatatggcaaagaattgtagcatccaaatttttgacaactacagatttagaattgaatccaaggtctgccattcactagctatgtgcaagttactcaacttctcttatcctcagattttgcagctgtaaagcagaggtagcatatttctgagaaattatattcaggtgactagatatgtgttcaagtgttatcttttattcttataaaagataattgtgaggaatccagtgctattttcacaattttaattctaaaactctgaagacattaaacaggcagtttgtaggaatcattgaaattttatacaagccgaaggaacaacattcagcaaaacggaaacaaataaatacagcatggaagcatatattcatgtttcccataattactaagttacggaaggggtgtgaggagctggcagtggtggtgaataggcattgtttgcattactaaatatatataccatttcttaagataattggaactcaagcagtcctaattttctctccctgttatgagcaatcagtaaatttgtagtcaatttaacttattatcagttggtatagcgcatgtcacagaataggatagcaagaagattctcagagatcattttctggtaaagaaaaaggcctagcaatatttaacagtttgacttaatccatcacttcagctggtccactagttttgacacaggactagttaatgatttgttaggaagtctccatctactcttaaactaatttaaaaaaaagctaaaagttgcttttaatatgttagggtataacttcaataaacaggagtatttatctagtggttcagaaataaaataattgttagccagcctgtgattaaggctaccataattgcataataaatagctttgacgtgaataatctcagttgttcaagtgtacaaatttaaagctgtactatgttagaataaaaaagtaggctcaaggaaaatttctatttttctatatgaaaaagagaatgatattcaaaatagtatttttaagtagtttctaattgtgttcctttaaagagtattagaaatgtctgttatgtcagtaacattagaaaacttcaaaaactgatttatttttctgagttctctggaaaccaaacaattttgaattagttgtgtaagtaaagtaagttaagttatagcttgctggaattttattgtggaaaacaaatatagattttatctgaaaaattttaagggccaattctacagaaagttatgctaacatgctaactttccacacatggctgcattccattttgattaatgagggttcaggaaatagaaaggcagtctctgcagaagcagtatccaaaggctaaattaacaacccaggactaccactcattatgtgagaaatatgggccagagttacaatatcacatctccagtctcagattggcctcattagccaccttcagttccttaaatgagataatcctgaagatgccatccttgtccaaggtgagattgccagaggatatgagctcatctaggatggaatacatgtctccagggactgtaatgagatcaggcttttcatttactggttttctgcctcaagagtccttaagcaaatgaagattatctgattgtctatgtaaacctggaagtagtctactttttagataaaagataatctatcttgaatatttcatatgtgattttaaaataattaatcaaaaaacaaagactatcatatttgagaacaagattttacttagaagggaaaaaaaagaactttcagcttaatcggggttaagggagtaattgtgacaatataaaatggcattgttatagaatccctaaaaggtaaataatgtatgagatgaaggtaggaagtaatgtgtgcttgcagaaatgcaactggtcaaaattacttgaatgaaattgttgaggttaaacatcttcattataataatatgtcttattctgattccaagacaatacgaatgtagagaagagatttttaaatggaaaaagtaaggagctaacaagtctgtacctagattcaagttcacaaagcggcaaaaaggagaaaagtgtcaacaagaaacaagaagaggagtagtaaactaaggatcaaagcccaagttccagttttcacaatctgctgtataattcactaacatttctgagccatagatttttaatctgtaaaaggagtgtgatggactgtacattagaagtacctgagaagctcttaataaatcttgatgaattggttagaaattctaatttaattagcctggcacagtgcacaaactgccatatattcgtgcagatgttttcttcttttcttactgcgcatttccatgtggccatgtcactacaaggggtggggaagaagttaatgtgtaattgcttcaggagctctgaataaaaggttgctgaagcaaaatactgcaatgaagttctgaaaatgaagagttaggactttacatgatttctcttgcctcattccctcaagaatgcacatatagacacacatatgccaatatcttttttatgtagttcaagtataactttgaataaaatgacttacattcaaggaaggtcaaaactattattctgaaacaaaatgtgacaattctagccattatgtgaattgtaagggtcagtaatccataaattatttggatggtaattgtatgttttattaatgtgatgtaattttgcactattgtattgtcatatttaatcaaactcttaaaaataccctgaaacataatgccaaatgtacagtttataggttcgtgttatttctgataagaatttaattgcattgtgctaatagttgtttattgctattaactttctgtgtatgtattattgcgatgcagacccaatagggttattttaagcacactaattagtcatctggatttttatagataaaatcacatgttgatcagaaatcatttttctacttatttttttgtagagtatttttccacacttgaaaaaaacatgattattttatatcaaacatcaacttttctttaaatcttattttagtagctaatgcatgtttgaaataagatgtgttagaaattatatgactatattaaggttgtgtttatattaggtgaaaaattgcatgcaattggtgaatcatgcagctttggggacatttacactgccactcacacacaggctctgtctcaatccgtatgcatgattcacgtcctttcaaaagtcccttttcaacatttggtaaagtgaaaatgttattcatagtgctaatgagccaataaacaatgctgcgtttcttttttctaactgcagcatattgtggtaaattttctcccaaaactttatttttggagttattgttggcaataaatacaacaaattatttgttggcaagtgatacaatttactgtataacaacttaatagtacaaagcatgaagatgtgaaaatatcatcttaaccagtttcattctatgaacataatattctggcagctttttctataactgagaatggtatatctttttatacactgcctaaatcagtactactgccagtcacctgaggtcaggtctgcacaacactaaattgggcaataacatagaacatctaggcagtcttgacagtcaaccagtgtaatcactaggggaagaaaaagtaggcctacccttttacttattaacttaagtaataaaaattgtataaaaatatgaatgttggctgcagaggagcctttacatgcagataatttgaagcagtctttgaaaataacaaaaattattccatttaatgaagggtttgttttgtttagcttttctcttttattcagaaaacatacctgtgcttttgaaagggcttaatcccaaacaggtaatatgtgtggatcaatcatctctcctcccatgaaattaatcattcatggtaatatattaaggctggaacgtagctcttagtgacttaaaacatgacagtaagcatttacactgttggaaggtaatttcattgctatgttattaaaatgatgggaatcctatttatacatttatttatttatttatttacagaagattggttccttccagttcaatttaacagcttcagtgaagttagtataatgataagaaaaattgactgtagctattattccaagtgaaaatcatgcagctgagtcctgctgcatcctgggagcaaagcattaattcaaatgaggagtagtcagtcctagcactgtagacgccgactttaccaaccaagatagtgtatgtgtgtgacattcagctaacattgatctaggcacttagtttgctaccacattgttcccttcattgattgaaactgtaaataacataacactttaaggcagctaagcaaatattttaataagccatgaaaggcaagatgccagagaaaatctgtatattcagctatttggagaactcgtgttttccacaaattaaactggagatgtcatttgaaattttcttcccttaaacatgctgtcacaacatggattccttctcatggatgtctttctaggcttataaatatatggtgtgattgctataattttgtgaaattttattcagcaattaatagtgatttcagcaatatgtactaagattccaaggcagaaataaatgtataaaggatttgagcctgtatgtgtaagaagaaactctctcttcagtcatatttcctaaattcagtgtaagtacctcgctgatttagcactggagttattccttgaatgtgtaaataatgatgttctattctgacctaatgaattcctgtaatgtgaatatttaaaataaaagaattcaatttaaatgtaaaaaaaaaaaaaaaaaa

SEQ ID NO: 140 - DNA, 5877 bp, Artificial Sequence
  CEP68
agggcgtggtcagcgcggccgaagggcgtggttggcgctcggtcctgccctgcgcgttttgggctgcggttggagggccgcagttgcagtcagggtccgccagctcggggccagcgcatggggctgctgagaccgctccggacgtgcgaagcgttcgcggtgcggtaggaagctgaagtcttcagcagaaccctgacctaggtagggagtctcaatggccctgggtgaagaaaaggcagaagcggaagcatctgaagacacaaaggcccagtcctatgggagagggagctgcagggagcgggagctggacatcccagggcccatgagtggggagcagcccccacgcctggaagctgagggagggctcatctcccctgtatggggggcagaagggatacctgcccctacttgctggattgggactgaccctggcggcccctctagagcccaccagccacaggccagtgatgccaacagagagcccgtagctgagaggtctgagcctgcactcagtggcctgcctcctgccaccatggggtctggagaccttctgctctccggggaaagccaggtggagaagaccaagctttcttcctccgaggagttccctcagactctgagccttcccagaacaacaactatttgctcaggacatgatgctgataccgaagatgatccatccctagcagatttgccccaggcactggacctcagccagcagcctcacagctcaggtctctcttgcctgtcacagtggaagtccgtgctgagcccaggttccgcagctcagccttccagctgcagcatctctgcttcctccacaggcagcagtctccagggtcaccaggagagggcggagcctcgtggtggttctctggccaaggtctcctcctccctggagccggtcgtcccccaggaaccttcctctgtggtggggctaggacctcggccccagtggtcaccacagcctgtgttctctgggggtgatgcttctgggctaggcaggagacgcctctccttccaggctgagtactgggcctgtgtgctgccagattccctgcctccatcacccgaccgccactcccctctctggaacccaaataaagagtatgaagatctgcttgactatacttacccactgaggcccgggcctcagctcccaaagcaccttgatagccgtgtgccagctgaccctgtcctgcaggactccggggtagacctggatagcttctctgtctctccagcaagcaccctcaaatcacctactaatgtctcccccaactgcccaccagcagaggccactgccctgccattttctgggcccagagagccaagccttaagcagtggccctccagagtaccccagaaacagggtggcatgggcttggcatcttggagccaacttgcatctacccccagagccccaggcagtagggatgctcgttgggagcgcagagagccagccctgaggggtgcgaaggaccggctgactataggcaagcaccttgatatgggctctccccagctaaggacacgggacagagggtggccctcgcccaggccagagagggagaagaggaccagccagagtgcccggcgccctacctgcacagagtctaggtggaaatcagaagaggaagtggaaagtgatgacgagtatcttgccctccccgctcggctgacacaggtttctagcctggtttcgtatctaggatccatttctaccttggttaccctgcccactggggatatcaaagggcagagccccttggaagtgtcagacagtgatgggccagcttccttcccttcaagctccagccaaagccagcttccccctggagctgccctccaaggatctggggatcctgagggccagaatccctgtttcctgcgctccttcgtccgtgcccacgactccgcaggggaaggcagtctggggagcagccaggccctcggggtctcctctggactgctgaaaacacgcccctccttgccagctaggttggaccggtggccattctcagacccagatgttgaagggcagcttcccaggaaaggaggagaacagggaaaagaatcactggtgcaatgtgtgaagacattttgctgtcagctggaagagctgatctgctggctgtataatgttgcagatgttactgaccacgggactgcagccaggtccaatcttacaagtctcaagtcttctctgcagctttaccggcaatttaagaaagatatagatgaacatcagtctctgacggagagtgtcttacagaagggggagattcttcttcagtgcctgttggagaacaccccagttttagaggatgtccttgggaggatcgcaaagcagtctggtgagctggagagccacgcagatcgcctgtatgactctatcttggcctctctggacatgctggctggctgcacccttatccctgacaaaaagcccatggcggcaatggagcacccatgtgaaggggtttaacctggcatcttctcaggcagaggtgcaacctgtcggccaaacactggctagtgagaaaaaaaaccttcaagaagtccttgcaagagccattcaacactgaagtcaagggggaaaccttcaatatactagctttaaaatgcctttctcctccctgaatggagggctgagttactatttttatttacaatgaatccttccaaactaaggttttccttttggtgcttctccacaaagagcgtgtagctttgcaatttttgataaaataagacgtgttgccttcccctctatcccattaaaaaagagcagataaagctcaaactattccacctggtagggtcatttaccaagggctggtaggagattccgaatactcaatattctcaggcatgcaagaggacctaagagactgaaaaaagtgaattgttggccagaaaccttgggtcttttcataaaaggaaatttgggcttgtcaatccctctttaaagatataggtagaaagaagagatttttaaccctttgtctgcaaaagaaaaagggttaaatgaagcatctatacagatgactttgggagattatgacaccttttgccatcttcagggcttacgtctttactttcttggctaaccagtttcttagaagaaaatgtgtcagggacttggggatctacagtcatgctttagcatggctatggagctaattatcaagcttaaagggtaactttgggaggactcctcccttcactcctagtctcccttggaagagcagtccaggctcagggaagggaacggataggatgacacagtaagtacagaaactgaagctgtcaatagtgaaggaaaaaggggaattcttcgttgctttggcattgacacataagtactttgattaaaaaaaaaaaaaactatggatcaaccattcaaagcatcaattctatagctttttgcagcaagatgatcagttattgctggtaactgcagattctacagaaaagcacttttaaagttctgttgggccatgaatgaacctggaaggaggaaagcacagtaacaatggaaactaaagtcctattattaatgtgacttttctgcttcagaatttctgagactttatagtcactggaaaatagccattaaattctttaaagattagctcttcaacagtagctacacataaaatgcagtatttcaagtgcctgatgctgctgtggtatgctttatcataatgcttaagggcatgatcaaaattaaaatggcttatgagtttgccatattaatcatcttagttccatacacactgagactttaaaagggaaaaaccactctagcaaataattgtcaattataaacctgtatgtaaaacattcttgaaaacctagagttggttaaaaaggtagagatgtctgacggcctcttcttaaattgatatattttaccttctcttagatgtacatttataagtaggaacatgtccttccactgagtatgttactgaatagcccttaggaaattaaacccatttatttactaatatttgacaggcatagaagtgtattaattagcataaaagttggagatgaaaaccctatagaaacaaattggccaatattatactaattgaatgcagaatgtggcattctattcccattcaactaataatcagcttcaactgacaggaatttgcacagaatgttacacaataccctgtttcccaagaaagtactaccttacctagagatgatctaagatatttttgttcatcctctgaataaggtgagactaaagggtgctaactccctggacctggctgtgaatgctactgaagagtatcaacacaactgttaattataccgccgtgctttaagtttaagacttaccttaaaactcaagctgaaggctgggcacggtggctcatgcctgtaatcccagcactttgggaggccgaggcgggtggatcacaaggtcaggagatcgagaccatcctggctaacacggtgaaaccccatctctactaaaaatacaaaaagaaattagccaggcgtggtgatgggcgcctgtagtcccagctacttgggaggctgaggcatgagaatggcatgaacccgggaggcggagcttgcagtgagctgagatggcaccactgcactccagcctgggcaacagagtgagactcttgtctcaaaaaaaaaaaatcaagctgaaattgtttcagcctagtaagatgctgccagcagcatttctatgagcaaacatggccaaattagagtcaagtagctgagcttgctaactgcactgtgatgccacactggaataacttagtagtcccttaaaattaatggaagttaaatccacagggaagtgatgatactcaaagctggatcagcagtttcaagatctgggttcttggagatccataggtaagctcagcaaatggaagacgacgtcaacacggctattttgaagcttaggtgggaatggaacacaaagaaggtttgaggtaagatatgctggaaaggcaagatgtaggctaagggaaattcaatccaaggtcgaagaataggaaattactgctcagaccacaatgactatcattctgaaaggatttcacagagtgtgcagctgcttagatttaagaacactcttcttcactatgtaaactaatttatggcagcaccttatatttagaacaagtggtaattccctttactaagtgaacagattattaaaacctgtagtagctttgaaccgtttgtacttgaaaatgggggtataaaggggtatatattttttccagaaccacatttattggcgtatacatagaagcaaatcttaaggcatgctgaaatttgttgtaaatcccaatctttactgccatggggaaaagaacgctggaattttccaaacttaagtctgtaaatatgctcatcttaagttcatgtaatgtttccgctaactcaccaagaataagctgacaatttaaacaacttttactgtgtaaaaatgaagtgcacggcatggcatcacagtatcttgacatttgttttgtgtcatttagctactttagaaaatagtttctgaactctttccccctttatactgtattaaggcaaaaacaaaacttctgaagcattaaagatcttcaccaaaataactattggtaacttcaggaatttgtcagttgccttatgtgaggatgaatagatccaccaagcacgcctataatacaaagtaaactatgatttttattgtgaaattttcatagatggaaaattgaatattctgtccatttcattttacaattatcttaccacttatttttgtaccatgtatttcaattgcctgtttagtgaaaaataaaaattaaaaaaacctattcaaaaaaaaaaaaaaaa

SEQ ID NO: 141 - DNA, 4846 bp, Artificial Sequence
  PNMA2
gagcggtgctcaggggagggctggaggggagggaaggagagagagaggggagggcggcaccgcccctagccccgcgctccggaagtgaagcggccagaccaccagctaatggatgcggagcggagggcccgctgaccgctctccgcgcctggagcagcttggcttggctggagctaagagccagacacaccactgtgtggaggtgggtgatgtcttcctgtgctaaaaggtgaataaataagctcctcacctctcgcggaacactcgggaacacatcaacaggggtccaagccgccctgctgggaggcttctcttcaagagttctgggtcccagagtggaaggcattttcccatcaactggagagagacgaaacatcagagaccaggaggctgtggagaaagcagctgtcccaggtgcctcaactatcagagaagggtcagcgtcacgtggctgccagcatctttgagaaaatcactggcaatcggacttcagagctgcgggcacaggtgtggttagaactgagatacgacctgcccacctgggtcaggcctaaagacaagaagtcctgagttcttgccactgagtaggccagggtcatttgtccagaaaactttgtgactgtctttgagtgacctagtctgggacccattcattggtgggttctaaggttagaagctcatccaggatattttcaatattaagtcagtgcatagctgcaccactaacaaattggtgcctgtagagtcagagtgggtcaattcttaggacaatggcgctggcactgttagaggactggtgcaggataatgagtgtggatgagcagaagtcactgatggttacggggataccggcggactttgaggaggctgagattcaggaggtccttcaggagactttaaagtctctgggcaggtatagactgcttggcaagatattccggaagcaggagaatgccaatgctgtcttactagagcttctggaagatactgatgtctcggccattcccagtgaggtccagggaaaggggggtgtctggaaggtgatctttaagacccctaatcaggacactgagtttcttgaaagattgaacctgtttctagaaaaagaggggcagacggtctcgggtatgtttcgagccctggggcaggagggcgtgtctccagccacagtgccctgcatctcaccagaattactggcccatttgttgggacaggcaatggcacatgcgcctcagcccctgctacccatgagataccggaaactgcgagtattctcagggagtgctgtcccagccccagaggaagagtcctttgaggtctggttggaacaggccacggagatagtcaaagagtggccagtaacagaggcagaaaagaaaaggtggctggcggaaagcctgcggggccctgccctggacctcatgcacatagtgcaggcagacaacccgtccatcagtgtagaagagtgtttggaggcctttaagcaagtgtttgggagcctagagagccgcaggacagcccaggtgaggtatctgaagacctatcaggaggaaggagagaaggtctcagcctatgtgttacggctagaaaccctgctccggagagcggtggagaaacgcgccatccctcggcgtattgcggaccaggtccgcctggagcaggtcatggctggggccactcttaaccagatgctgtggtgccggcttagggagctgaaggatcagggcccgccccccagcttccttgagctaatgaaggtaatacgggaagaagaggaggaagaggcctcctttgagaatgagagtatcgaagagccagaggaacgagatggctatggccgctggaatcatgagggagacgactgaaaaccacctgggggcaggacccacagccagtgggctaagacctttaaaaaatttttttctttaatgtatgggactgaaatcaaaccatgaaagccaattattgaccttccttccttccttccttccctcccttcctccttctctccttctctcctcctctctcctctcctctcctctctttccttccttccttccttttttctttttctctttcttctttatttcttgggtctcactctcatcacccaggctagagtgcagtggcacaaaaatctcggctcactgcagccttgacttcccaggctcaggctcaggtgatcctcacaccttagcctcccaagtacctgggactacaggcacgcaccaccatgcctagctattcttttgtatttttggtagagacagggttttgctgtgttgctcaggctggtctggaacccctaggctcaaatgatgtgcccaactcggcctcccaaagtgctgggattacaggcatgaaccgccatgcctggcccttgatttttctttttaagaaaaaaatatctaggagtttcttagaccctatgtagattattaatgaacaaaagattaaactccaaatattaaatagtaagcctgaaggaatctgaaacacttgtacttccaattttctttaaataatcccaaatagaccagaattggcccataccatagaagaaagaattggcagtcaaaaaaaaaaataccttttgtaatgtttgaaaaataaagctgtttgacttgtcaggtgttttcctttctcaaatcagcaaattctctctgagtgcctggctttgtgagacactgtacaaggagttacaagactacagctataacctgcagttgagcagttataaacctacaaaatgggccctgccctcagagaggttccagtctagatgaggagctgatctagacaggtaaaaggctaactaaccctttgtgtaaataagttcatcaccccagtaaaagtgtcatcacccagtgaataggaccacctctgcctgcagatttttgttgttgttgttgtcattgttgttgttgttttaacctgggaagtgttcttcctgcctttctgctaggtgtcagatagatggtcccagagctaggtgctgtgtcaggccctgaagacacagatgactcaacctaagctttactttccagaggtccacagcctgagaggtgtccccaaagaaagggggacatgaggggactgcatgcttgagagcagggttgtttagggcaggtttggatttagtgagcaggctggtttgcttagagaaggcttttagtggcaacaaaggatgaagaggagagaaaaggaactcacatttattgagggcctactgtgtgcaaagtgtttcatgtatatctcattgaatgtatacagccaccctgttgtggtataattttgctctttataaagagaaagaccgaagctcagatgagttaagtggtctcctcaacaccaaaatgccaagaagtgatggagcctagacagaagcccagaactttctgactcacactagtccatcctctaccatcacgatgactttcaaattgtgctctgcagttctgcagattttctagcagtgccatctccaaaatgtgttttaaactctttatttttttaattattattagtattattttgagactgagtcttgctctatcacccaggctggagtgcagtggtgcaatctcagctcactgcaacctccgcctcccaggttcaagcgatttcgtgcctcagcctcccgagtagctgggattacaggcacccaccaccacgcccagctaatttttgtatttttagtagaaatggggtttcaccatgttggccaggctggtctcgaactcctgacctcaagtgatccactcacctcggcctcccaaagtgctgggattacaggtgtgagccaccatgcctgggctaaactctttaagtctctagtaaatgcagctagattcaaatgggctgataaccaaattttaacacatcagcattcaccaccaggtttacttttattttcagattggctcattttgtgcagaccttagagcaaagtttcctttatggtatctgtgtacgtatccaaacttcttttaattgttcacagattttaaaagcggtagcaccacatggttgtgtagatcagacctgtgtatttagatcagacctgtgtatcacgtaagtgtgtgagtgcagtgcagatgagcaccatttagttatatgtgctaggcaaatctccaacacagttgatgtgtagtcttgtggtagatttgtgcatactgtaagcaaattgcttagcttctctagacatcagtttccacatctgaaaaataagaagatgagagtacacggttgttatgaacaaatgacttaatgctttttaagcacgttgcatgacatctggaacacagaaagccctcaatacattgaagctcttaggattttcacgatgttcctgtctgctcaatgcatgctttctttattgttctgacagttgtgtggtaacaagctaatatgcttccagttgacttccagtctaccctggtgttagaaaccgtttcatctcttattgtaaatttgagtgcttgttgttttttatatttgtgatgactcttccagcagttgttgacaattgttagaggtttgacttttaaataattacttattttttctgattgtggttcagtttaactgaagaatatcctgagattgtaagaaaagcattttttaaaaggtatcacttgtgatcatttatctttctaaattctatttttaatactgttccaccaaagtgatgcagtggttaccatgacaccctaatttcatgtgtttttgtatttatgaaaatagtttcattgtcatttattggcggtatacaaagtaaaatgttataaatgtgaagttataaaataaatatatgctaataaaatcctgagtttttctgtttcct

SEQ ID NO: 142 - DNA, 3032 bp, Artificial Sequence
  POU2AF1
gcgctctgggccggggccgctggggcgcgcacagtggggtgacaggcggcctggctgcagaaacgttgcaccggtgcctgaggtgggaggatgtgatgacgcggcccacgcagcgggaacccaggcctttaaaaagcccaggaaacagcctcagctcaagcggtggctccactggaggaaaacacaccccggtctcacattaaagaagccaaactgtcggcttcaaagagaaaaggcaacatcctgtcacaggccatgctctggcaaaaacccacagctccggagcaagccccagccccggcccggccataccagggcgtccgtgtgaaggagccagtgaaggaactgctgaggaggaagcgaggccacgccagcagtggggcagcacctgcacctacggcggtggtgctgccccatcagcccctggcgacctacaccacagtgggtccttcctgcctggacatggaaggttctgtgtctgcagtgacagaggaggctgccctgtgtgccggctggctctcccagcccaccccggccaccctgcagcccctggccccatggacaccttacaccgagtatgtgccccatgaagctgtcagctgcccctactcagctgacatgtatgtgcagcccgtgtgccccagctacacggtggtggggccctcctcagtgttgacctatgcctctccgccactcatcaccaatgtcacgacaagaagctccgccacgcccgcagtggggcccccgctggagggcccagagcaccaggcacccctcacctatttcccgtggcctcagcccctttccacactacccacctccaccctgcagtaccagcctccggccccagccctacctgggccccagtttgtccagctccccatctctatcccagagccagtccttcaggacatggaagaccccagaagagccgccagctcgttgaccatcgacaagctgcttttggaggaagaggatagcgacgcctatgcgcttaaccacactctctctgtggaaggcttttaggcgtggctcccacctgagtcctgttccctgaaactgggattttaaaatgagcctggaattgagccccaggttcatgcttgtttggagtagtcatttcatgactacactttctacgcacagctagaattgtagacctgtaaaccttccttcccttcttccttcccctccctccctcacttcctccctctcccccatccttccattcttcccctccctcccttcttcctttccaaccccttccttccttttcctccctcccttccttccctccttcccttctccctttccaaccccttccttccttttcctccctcccttccttccctccttcccttctccctttccttctttacctccctccctccctcgcttcttctctctttcttacttcttttttcaattctgttccattttgggaggtaattatagggattttagcaataacattttatgtcaaatgttgccaagtctgtggtccatgggctttcatttctgtcacatttcatttcttggaaaaggcctccttcctccagtgcctgctgaaccatcttagggtcactcacaccctctgtaattttaagatgtatgtggtggccggcgggaagaccagccccgacagcacctcctgagaaagtcagccaagggcctaccctgatgccagagtccttgagctgtcagttcccacagttgctcctttgtttgctcttctcagcctcggccagatttacagtccaggcagcaaaatctcaaggcctggggctcagagtagtaaggggtgggaagtgggtggcagggagaaaagaacatcagggtgggtggggacaggccagtgacgaagagagggacagaggagggatgggaacaggctgtgcatcttagttggagagaggggtgtgggaggaagcttgagtttgatgcagggaggaggaaggctgaggaatgacttggctccagattacttggttattaagaagaacaataaactaaaggaaagcattgcttgaagagatggttttgctgctctccttgaggatacgtgcaagggaagttgggctgttgtaaacagggtgaagggtgtgtttggtcggccatttctgtctcacctctaggccctctgctggtgctgtggaggccaagaccccattaagcctaaaggtgatgggtcctcgcctaggcttagtgctaccatgtgggttttgtttctttccttccttccttccttccttccttccttccttccttccttccttccttccttccttccttctttccttccttccttccttccttccttcctctctctttctttcttttttttggttttttttgggacggagtctcactccattgcccaggctggagtacaatggtgcgatcttggctcactgcacctctgtctcccaagttcaagtgattctcctgcctgagcctcccgagtagctgggattacaggtgcatgccaccatgcctggctaatttttgtatttttagtagagacggggtttcaccatgttggccaggctggtctcgaactcctgaccttgtgatccgcccgcctcagcctctcagagtgctgggatcacaggcgtgagccaccgcacccagccttttaccatgtgggtttctttagtgtcttaaaagcgtccataagccaccattctgtggaaccaaggccccctccacgcaaacaccctccctcctggggacctctggagcctcagccagaagtaccattaggtttaattttaatttgttttgctggagaaacatcaggtttgtaggagactgagttgttagcaggtgtgcttagctcttgatagtgaacgtgtaccttgggaactggctcacccacctgctaatagcaccatcgtcactattaagcagacatttcagttggtagaatccatgtagaagtcatggacttttctgggaaatgacttttctgggaaatgacagtttctttgacatattttctttgcccactttaaataaaaactctggagaaa

SEQ ID NO: 143 - DNA, 2428 bp, Artificial Sequence
  FUT7)
ctgggcccagcctatagtcagcggtgtctatgggcatggatctggacggggaaaaggacaaagcagcctccatccacagttcattccgggaccaggcccttgcaggcacgcgctgggctcctgtgggaagacactaagggccccaggacagacctcctctccgggcatctgggttcctagatggcagaggtggcagagtggggtgggatggcccaattgggagctttagcttccggcaaagagctgagcacagtacatcttcaatgtgtaagattctcctgggagaccagggcccagctggtggtgagctgggggaagtgggtgatactgccgtgggaggagccacctggccctctggggaagtgcactcgctgtctgcagcgcccaggcctgggtagctgggtgggggctggggggccatctgtgctcagggtgcctgcacctgggccttctctgccctgggccaagcctgcccgagcctctctgtcctctgcctgcccagctggacatctctgggcctctctggagaccagtggggtgggctgtgggggcgtcatattgccctggcttggcatccctcttgtggctgtacccctcccagcagccccaggactagcaagtccccgagatgggggtggggacagtggttgatgccaaaggttgtgggggcaggggcggggcaggagcaggaaggtcccctgagttccctcaccttgggcagagataaaaggagcacagttccaggcggggctgagctagggcgtagctgtgatttcaggggcacctctggcggctgccgtgatttgagaatctcgggtctcttggctgactgatcctgggagactgtggatgaataatgctgggcacggccccacccggaggctgcgaggcttgggggtcctggccggggtggctctgctcgctgccctctggctcctgtggctgctggggtcagcccctcggggtaccccggcaccccagcccacgatcaccatccttgtctggcactggcccttcactgaccagcccccagagctgcccagcgacacctgcacccgctacggcatcgcccgctgccacctgagtgccaaccgaagcctgctggccagcgccgacgccgtggtcttccaccaccgcgagctgcagacccggcggtcccacctgcccctggcccagcggccgcgagggcagccctgggtgtgggcctccatggagtctcctagccacacccacggcctcagccacctccgaggcatcttcaactgggtgctgagctaccggcgcgactcggacatctttgtgccctatggccgcctggagccccactgggggccctcgccaccgctgccagccaagagcagggtggccgcctgggtggtcagcaacttccaggagcggcagctgcgtgccaggctgtaccggcagctggcgcctcatctgcgggtggatgtctttggccgtgccaatggacggccactgtgcgccagctgcctggtgcccaccgtggcccagtaccgcttctacctgtcctttgagaactctcagcaccgcgactacattacggagaaattctggcgcaacgcactggtggctggcactgtgccagtggtgctggggcccccacgggccacctatgaggccttcgtgccggctgacgccttcgtgcatgtggatgactttggctcagcccgagagctggcggctttcctcactggcatgaatgagagccgataccaacgcttctttgcctggcgtgacaggctccgcgtgcgactgttcaccgactggcgggaacgtttctgtgccatctgtgaccgctacccacacctaccccgcagccaagtctatgaggaccttgagggttggtttcaggcctgagatccgctggccgggggaggtgggtgtgggtggaagggctgggtgtcgaaatcaaaccaccaggcatccggcccttaccggcaagcagcgggctaacgggaggctgggcacagaggtcaggaagcaggggtggggggtgcaggtgggcactggagcatgcagaggaggtgagagtgggagggaggtaacgggtgcctgctgcggcagacgggaggggaaaggctgccgaggaccctccccaccctgaacaaatcttgggtgggtgaaggcctggctggaagagggtgaaaggcagggcccttggggctggggggcaccccagcctgaagtttgtgggggccaaacctgggaccccgagcttcctcggtagcagaggccctgtggtccccgagacacaggcacgggtccctgccacgtccatagttctgaggtccctgtgtgtaggctggggcggggcccaggagaccacggggagcaaaccagcttgttctgggctcagggagggagggcggtggacaataaacatctgagcagtgaaaaaaaaaaaaaa

SEQ ID NO: 144 - DNA, 812 bp, Artificial Sequence
  REG1B
gatataaagctcctactctgtctgacctgacaagccacctcaagtggacaaggcacttaccaacagagattgctgatttgctccttaagcaagagattcactgccgctaagcatggctcagaccaactcgttcttcatgctgatctcctccctgatgttcctgtctctgagccaaggccaggagtcccagacagagctgcctaatccccgaatcagctgcccagaaggcaccaatgcctatcgctcctactgctactactttaatgaagaccctgagacctgggttgatgcagatctctattgccagaacatgaattcaggcaacctggtgtctgtgctcacccaggcggagggtgccttcgtggcctcactgattaaggagagtagcactgatgacagcaatgtctggattggcctccatgacccaaaaaagaaccgccgctggcactggagtagtgggtccctggtctcctacaagtcctgggacactggatccccgagcagtgctaatgctggctactgtgcaagcctgacttcatgctcaggattcaagaaatggaaggatgaatcttgtgagaagaagttctcctttgtttgcaagttcaaaaactagaggaagctgaaaaatggatgtctagaactggtcctgcaattactatgaagtcaaaaattaaactagactatgtctccaactcagttcagaccatctcctccctaatgagtttgcatcgctgatcttcagtaccttcacctgtctcagtctctagagccctgaaaaataaaaacaaacttatttttatccagtgaaaaaa

SEQ ID NO: 145 - DNA, 2490 bp, Artificial Sequence
  ASCL1
agcactctctcacttctggccagggaacgtggaaggcgcaccgacagggatccggccagggagggcgagtgaaagaaggaaatcagaaaggaagggagttaacaaaataataaaaacagcctgagccacggctggagagaccgagacccggcgcaagagagcgcagccttagtaggagaggaacgcgagacgcggcagagcgcgttcagcactgacttttgctgctgcttctgcttttttttttcttagaaacaagaaggcgccagcggcagcctcacacgcgagcgccacgcgaggctcccgaagccaacccgcgaagggaggaggggagggaggaggaggcggcgtgcagggaggagaaaaagcattttcactttttttgctcccactctaagaagtctcccggggattttgtatatattttttaacttccgtcagggctcccgcttcatatttccttttctttccctctctgttcctgcacccaagttctctctgtgtccccctcgcgggccccgcacctcgcgtcccggatcgctctgattccgcgactccttggccgccgctgcgcatggaaagctctgccaagatggagagcggcggcgccggccagcagccccagccgcagccccagcagcccttcctgccgcccgcagcctgtttctttgccacggccgcagccgcggcggccgcagccgccgcagcggcagcgcagagcgcgcagcagcagcagcagcagcagcagcagcagcagcaggcgccgcagctgagaccggcggccgacggccagccctcagggggcggtcacaagtcagcgcccaagcaagtcaagcgacagcgctcgtcttcgcccgaactgatgcgctgcaaacgccggctcaacttcagcggctttggctacagcctgccgcagcagcagccggccgccgtggcgcgccgcaacgagcgcgagcgcaaccgcgtcaagttggtcaacctgggctttgccacccttcgggagcacgtccccaacggcgcggccaacaagaagatgagtaaggtggagacactgcgctcggcggtcgagtacatccgcgcgctgcagcagctgctggacgagcatgacgcggtgagcgccgccttccaggcaggcgtcctgtcgcccaccatctcccccaactactccaacgacttgaactccatggccggctcgccggtctcatcctactcgtcggacgagggctcttacgacccgctcagccccgaggagcaggagcttctcgacttcaccaactggttctgaggggctcggcctggtcaggccctggtgcgaatggactttggaagcagggtgatcgcacaacctgcatctttagtgctttcttgtcagtggcgttgggagggggagaaaaggaaaagaaaaaaaaaagaagaagaagaagaaaagagaagaagaaaaaaacgaaaacagtcaaccaaccccatcgccaactaagcgaggcatgcctgagagacatggctttcagaaaacgggaagcgctcagaacagtatctttgcactccaatcattcacggagatatgaagagcaactgggacctgagtcaatgcgcaaaatgcagcttgtgtgcaaaagcagtgggctcctggcagaagggagcagcacacgcgttatagtaactcccatcacctctaacacgcacagctgaaagttcttgctcgggtcccttcacctcctcgccctttcttaaagtgcagttcttagccctctagaaacgagttggtgtctttcgtctcagtagcccccaccccaataagctgtagacattggtttacagtgaaactatgctattctcagccctttgaaactctgcttctcctccagggcccgattcccaaaccccatggcttccctcacactgtcttttctaccattttcattatagaatgcttccaatcttttgtgaattttttattataaaaaatctatttgtatctatcctaaccagttcggggatatattaagatatttttgtacataagagagaaagagagagaaaaatttatagaagttttgtacaaatggtttaaaatgtgtatatcttgatactttaacatgtaatgctattacctctgcatattttagatgtgtagttcaccttacaactgcaattttccctatgtggttttgtaaagaactctcctcataggtgagatcaagaggccaccagttgtacttcagcaccaatgtgtcttactttatagaaatgttgttaatgtattaatgatgttattaaatactgttcaagaagaacaaagtttatgcagctactgtccaaactcaaagtggcagccagttggttttgataggttgccttttggagatttctattactgcctttttttttcttactgttttattacaaacttacaaaaatatgtataaccctgttttatacaaactagtttcgtaataaaactttttcctttttttaaaatgaaaataaaaaaaa

SEQ ID NO: 146 - DNA, 10599 bp, Artificial Sequence
  COL6A3
aagccctgactggtatccctggccccagtccagtttggagctcagtcttccaccaaaggccgttcagttctcctgggctccagcctcctgcaaggactgcaagagttttcctccgcagctctgagtctccacttttttggtggagaaaggctgcaaaaagaaaaagagacgcagtgagtgggaaaagtatgcatcctattcaaacctaattgaatcgaggagcccagggacacacgccttcaggtttgctcaggggttcatatttggtgcttagacaaattcaaaatgaggaaacatcggcacttgcccttagtggccgtcttttgcctctttctctcaggctttcctacaactcatgcccagcagcagcaagcagatgtcaaaaatggtgcggctgctgatataatatttctagtggattcctcttggaccattggagaggaacatttccaacttgttcgagagtttctatatgatgttgtaaaatccttagctgtgggagaaaatgatttccattttgctctggtccagttcaacggaaacccacataccgagttcctgttaaatacgtatcgtactaaacaagaagtcctttctcatatttccaacatgtcttatattgggggaaccaatcagactggaaaaggattagaatacataatgcaaagccacctcaccaaggctgctggaagccgggccggtgacggagtccctcaggttatcgtagtgttaactgatggacactcgaaggatggccttgctctgccctcagcggaacttaagtctgctgatgttaacgtgtttgcaattggagttgaggatgcagatgaaggagcgttaaaagaaatagcaagtgaaccgctcaatatgcatatgttcaacctagagaattttacctcacttcatgacatagtaggaaacttagtgtcctgtgtgcattcatccgtgagtccagaaagggctggggacacggaaacccttaaagacatcacagcacaagactctgctgacattattttccttattgatggatcaaacaacaccggaagtgtcaatttcgcagtcattctcgacttccttgtaaatctccttgagaaactcccaattggaactcagcagatccgagtgggggtggtccagtttagcgatgagcccagaaccatgttctccttggacacctactccaccaaggcccaggttctgggtgcagtgaaagccctcgggtttgctggtggggagttggccaatatcggcctcgcccttgatttcgtggtggagaaccacttcacccgggcagggggcagccgcgtggaggaaggggttccccaggtgctggtcctcataagtgccgggccttctagtgacgagattcgctacggggtggtagcactgaagcaggctagcgtgttctcattcggccttggagcccaggccgcctccagggcagagcttcagcacatagctaccgatgacaacttggtgtttactgtcccggaattccgtagctttggggacctccaggagaaattactgccgtacattgttggcgtggcccaaaggcacattgtcttgaaaccgccaaccattgtcacacaagtcattgaagtcaacaagagagacatagtcttcctggtggatggctcatctgcactgggactggccaacttcaatgccatccgagacttcattgctaaagtcatccagaggctggaaatcggacaggatcttatccaggtggcagtggcccagtatgcagacactgtgaggcctgaattttatttcaatacccatccaacaaaaagggaagtcataaccgctgtgcggaaaatgaagcccctggacggctcggccctgtacacgggctctgctctagactttgttcgtaacaacctattcacgagttcagccggctaccgggctgccgaggggattcctaagcttttggtgctgatcacaggtggtaagtccctagatgaaatcagccagcctgcccaggagctgaagagaagcagcataatggcctttgccattgggaacaagggtgccgatcaggctgagctggaagagatcgctttcgactcctccctggtgttcatcccagctgagttccgagccgccccattgcaaggcatgctgcctggcttgctggcacctctcaggaccctctctggaacccctgaagttcactcaaacaaaagggatatcatctttcttttggatggatcagccaacgttggaaaaaccaatttcccttatgtgcgcgactttgtaatgaacctagttaacagccttgatattggaaatgacaatattcgtgttggtttagtgcaatttagtgacactcctgtaacggagttctctttaaacacataccagaccaagtcagatatccttggtcatctgaggcagctgcagctccagggaggttcgggcctgaacacaggctcagccctaagctatgtctatgccaaccacttcacggaagctggcggcagcaggatccgtgaacacgtgccgcagctcctgcttctgctcacagctgggcagtctgaggactcctatttgcaagctgccaacgccttgacacgcgcgggcatcctgactttttgtgtgggagctagccaggcgaataaggcagagcttgagcagattgcttttaacccaagcctggtgtatctcatggatgatttcagctccctgccagctttgcctcagcagctgattcagcccctaaccacatatgttagtggaggtgtggaggaagtaccactcgctcagccagagagcaagcgagacattctgttcctctttgacggctcagccaatcttgtgggccagttccctgttgtccgtgactttctctacaagattatcgatgagctcaatgtgaagccagaggggacccgaattgcggtggctcagtacagcgatgatgtcaaggtggagtcccgttttgatgagcaccagagtaagcctgagatcctgaatcttgtgaagagaatgaagatcaagacgggcaaagccctcaacctgggctacgcgctggactatgcacagaggtacatttttgtgaagtctgctggcagccggatcgaggatggagtgcttcagttcctggtgctgctggtcgcaggaaggtcatctgaccgtgtggatgggccagcaagtaacctgaagcagagtggggttgtgcctttcatcttccaagccaagaacgcagaccctgctgagttagagcagatcgtgctgtctccagcgtttatcctggctgcagagtcgcttcccaagattggagatcttcatccacagatagtgaatctcttaaaatcagtgcacaacggagcaccagcaccagtttcaggtgaaaaggacgtggtgtttctgcttgatggctctgagggcgtcaggagcggcttccctctgttgaaagagtttgtccagagagtggtggaaagcctggatgtgggccaggaccgggtccgcgtggccgtggtgcagtacagcgaccggaccaggcccgagttctacctgaattcatacatgaacaagcaggacgtcgtcaacgctgtccgccagctgaccctgctgggagggccgacccccaacaccggggccgccctggagtttgtcctgaggaacatcctggtcagctctgcgggaagcaggataacagaaggtgtgccccagctgctgatcgtcctcacggccgacaggtctggggatgatgtgcggaacccctccgtggtcgtgaagaggggtggggctgtgcccattggcattggcatcgggaacgctgacatcacagagatgcagaccatctccttcatcccggactttgccgtggccattcccacctttcgccagctggggaccgtccaacaggtcatctctgagagggtgacccagctcacccgcgaggagctgagcaggctgcagccggtgttgcagcctctaccgagcccaggtgttggtggcaagagggacgtggtctttctcatcgatgggtcccaaagtgccgggcctgagttccagtacgttcgcaccctcatagagaggctggttgactacctggacgtgggctttgacaccacccgggtggctgtcatccagttcagcgatgaccccaaggtggagttcctgctgaacgcccattccagcaaggatgaagtgcagaacgcggtgcagcggctgaggcccaagggagggcggcagatcaacgtgggcaatgccctggagtacgtgtccaggaacatcttcaagaggcccctggggagccgcattgaagagggcgtcccgcagttcctggtcctcatctcgtctggaaagtctgacgatgaggtggacgacccggcggtggagctcaagcagtttggcgtggcccctttcacgatcgccaggaacgcagaccaggaggagctggtgaagatctcgctgagccccgaatatgtgttctcggtgagcaccttccgggagctgcccagcctggagcagaaactgctgacgcccatcacgaccctgacctcagagcagatccagaagctcttagccagcactcgctatccacctccagcagttgagagtgatgctgcagacattgtctttctgatcgacagctctgagggagttaggccagatggctttgcacatattcgagattttgttagcaggattgttcgaagactcaacatcggccccagtaaagtgagagttggggtcgtgcagttcagcaatgatgtcttcccagaattctatctgaaaacctacagatcccaggccccggtgctggacgccatacggcgcctgaggctcagaggggggtccccactgaacactggcaaggctctcgaatttgtggcaagaaacctctttgttaagtctgcggggagtcgcatagaagacggggtgccccaacacctggtcctggtcctgggtggaaaatcccaggacgatgtgtccaggttcgcccaggtgatccgttcctcgggcattgtgagtttaggggtaggagaccggaacatcgacagaacagagctgcagaccatcaccaatgaccccagactggtcttcacagtgcgagagttcagagagcttcccaacatagaagaaagaatcatgaactcgtttggaccctccgcagccactcctgcacctccaggggtggacacccctcctccttcacggccagagaagaagaaagcagacattgtgttcctgttggatggttccatcaacttcaggagggacagtttccaggaagtgcttcgttttgtgtctgaaatagtggacacagtttatgaagatggcgactccatccaagtggggcttgtccagtacaactctgaccccactgacgaattcttcctgaaggacttctctaccaagaggcagattattgacgccatcaacaaagtggtctacaaagggggaagacacgccaacactaaggtgggccttgagcacctgcgggtaaaccactttgtgcctgaggcaggcagccgcctggaccagcgggtccctcagattgcctttgtgatcacgggaggaaagtcggtggaagatgcacaggatgtgagcctggccctcacccagaggggggtcaaagtgtttgctgttggagtgaggaatatcgactcggaggaggttggaaagatagcgtccaacagcgccacagcgttccgcgtgggcaacgtccaggagctgtccgaactgagcgagcaagttttggaaactttgcatgatgcgatgcatgaaaccctttgccctggtgtaactgatgctgccaaagcttgtaatctggatgtgattctggggtttgatggttctagagaccagaatgtttttgtggcccagaagggcttcgagtccaaggtggacgccatcttgaacagaatcagccagatgcacagggtcagctgcagcggtggccgctcgcccaccgtgcgtgtgtcagtggtggccaacacgccctcgggcccggtggaggcctttgactttgacgagtaccagccagagatgctcgagaagttccggaacatgcgcagccagcacccctacgtcctcacggaggacaccctgaaggtctacctgaacaagttcagacagtcctcgccggacagcgtgaaggtggtcattcattttactgatggagcagacggagatctggctgatttacacagagcatctgagaacctccgccaagaaggagtccgtgccttgatcctggtgggccttgaacgagtggtcaacttggagcggctaatgcatctggagtttgggcgagggtttatgtatgacaggcccctgaggcttaacttgctggacttggattatgaactagcggagcagcttgacaacattgccgagaaagcttgctgtggggttccctgcaagtgctctgggcagaggggagaccgcgggcccatcggcagcatcgggccaaagggtattcctggagaagacggctaccgaggctatcctggtgatgagggtggacccggtgagcgtggtccgcctggtgtgaacggcactcaaggtttccagggctgcccgggccagagaggagtaaagggctctcggggattcccaggagagaagggcgaagtaggagaaattggactggatggtctggatggtgaagatggagacaaaggattgcctggttcttctggagagaaagggaatcctggaagaaggggtgataaaggacctcgaggagagaaaggagaaagaggagatgttgggattcgaggggacccgggtaacccaggacaagacagccaggagagaggacccaaaggagaaaccggtgacctcggccccatgggtgtcccagggagagatggagtacctggaggacctggagaaactgggaagaatggtggctttggccgaaggggaccccccggagctaagggcaacaagggcggtcctggccagccgggctttgagggagagcaggggaccagaggtgcacagggcccagctggtcctgctggtcctccagggctgataggagaacaaggcatttctggacctcggggaagcggaggtgccgctggtgctcctggagaacgaggcagaaccggtccactgggaagaaagggtgagcccggagagccaggaccaaaaggaggaatcgggaaccggggccctcgtggggagacgggagatgacgggagagacggagttggcagtgaaggacgcagaggcaaaaaaggagaaagaggattccctggatacccaggaccaaagggtaacccaggtgaacctgggctaaatggaacaacaggacccaaaggcatcagaggccgaaggggaaattcgggacctccagggatagttggacagaagggagaccctggctacccaggaccagctggtcccaagggcaacaggggcgactccatcgatcaatgtgccctcatccaaagcatcaaagataaatgcccttgctgttacgggcccctggagtgccccgtcttcccaacagaactagcctttgctttagacacctctgagggagtcaaccaagacactttcggccggatgcgagatgtggtcttgagtattgtgaatgacctgaccattgctgagagcaactgcccacggggggcccgggtggctgtggtcacctacaacaacgaggtgaccacggagatccggtttgctgactccaagaggaagtcggtcctcctggacaagattaagaaccttcaggtggctctgacatccaaacagcagagtctggagactgccatgtcgtttgtggccaggaacacatttaagcgtgtgaggaacggattcctaatgaggaaagtggctgttttcttcagcaacacacccacaagagcatccccacagctcagagaggctgtgctcaagctctcagatgcggggatcacccccttgttccttacaaggcaggaagaccggcagctcatcaacgctttgcagatcaataacacagcagtggggcatgcgcttgtcctgcctgcagggagagacctcacagacttcctggagaatgtcctcacgtgtcatgtttgcttggacatctgcaacatcgacccatcctgtggatttggcagttggaggccttccttcagggacaggagagcggcagggagcgatgtggacatcgacatggctttcatcttagacagcgctgagaccaccaccctgttccagttcaatgagatgaagaagtacatagcgtacctggtcagacaactggacatgagcccagatcccaaggcctcccagcacttcgccagagtggcagttgtgcagcacgcgccctctgagtccgtggacaatgccagcatgccacctgtgaaggtggaattctccctgactgactatggctccaaggagaagctggtggacttcctcagcaggggaatgacacagttgcagggaaccagggccttaggcagtgccattgaatacaccatagagaatgtctttgaaagtgccccaaacccacgggacctgaaaattgtggtcctgatgctgacgggcgaggtgccggagcagcagctggaggaggcccagagagtcatcctgcaggccaaatgcaagggctacttcttcgtggtcctgggcattggcaggaaggtgaacatcaaggaggtatacaccttcgccagtgagccaaacgacgtcttcttcaaattagtggacaagtccaccgagctcaacgaggagcctttgatgcgcttcgggaggctgttgccatccttcgtcagcagtgaaaatgctttttacttgtccccagatatcaggaaacagtgtgattggttccaaggggaccaacccacaaagaaccttgtgaagtttggtcacaaacaagtaaatgttccgaataacgttacttcaagtcctacatccaacccagtgacgacaacgaagccggtgactacgacgaagccggtgaccaccacaacaaagcctgtaaccaccacaacaaagcctgtgactattataaatcagccatctgtgaagccagccgctgcaaagccggcccctgcgaaacctgtggctgccaagcctgtggccacaaagatggccactgttagacccccagtggcggtgaagccagcaacggcagcgaagcctgtagcagcaaagccagcagctgtaagaccccccgctgctgctgctgcaaaaccagtggcgaccaagcctgaggtccctaggccacaggcagccaaaccagctgccaccaagccagccaccactaagcccatggttaagatgtcccgtgaagtccaggtgtttgagataacagagaacagcgccaaactccactgggagagggctgagccccccggtccttatttttatgacctcaccgtcacctcagcccatgatcagtccctggttctgaagcagaacctcacggtcacggaccgcgtcattggaggcctgctcgctgggcagacataccatgtggctgtggtctgctacctgaggtctcaggtcagagccacctaccacggaagtttcagtacaaagaaatctcagcccccacctccacagccagcaaggtcagcttctagttcaaccatcaatctaatggtgagcacagaaccattggctctcactgaaacagatatatgcaagttgccgaaagacgaaggaacttgcagggatttcatattaaaatggtactatgatccaaacaccaaaagctgtgcaagattctggtatggaggttgtggtggaaacgaaaacaaatttggatcacagaaagaatgtgaaaaggtttgcgctcctgtgctcgccaaacccggagtcatcagtgtgatgggaacctaagcgtgggtggccaacatcatatacctcttgaagaagaaggagtcagccatcgccaacttgtctctgtagaagctccgggtgtagattcccttgcactgtatcatttcatgctttgatttacactcgaactcgggagggaacatcctgctgcatgacctatcagtatggtgctaatgtgtctgtggaccctcgctctctgtctccaggcagttctctcgaatactttgaatgttgtgtaacagttagccactgctggtgtttatgtgaacattcctatcaatccaaattccctctggagtttcatgttatgcctgttgcaggcaaatgtaaagtctagaaaataatgcaaatgtcacggctactctatatacttttgcttggttcattttttttcccttttagttaagcatgactttagatgggaagcctgtgtatcgtggagaaacaagagaccaactttttcattccctgcccccaatttcccagactagatttcaagctaattttctttttctgaagcctctaacaaatgatctagttcagaaggaagcaaaatcccttaatctatgtgcaccgttgggaccaatgccttaattaaagaatttaaaaaagttgtaatagagaatatttttggcattcctctaatgttgtgtgttttttttttgtgtgtgctggagggaggggatttaattttaattttaaaatgtttaggaaatttatacaaagaaactttttaataaagtatattgaaagtttcctgggaaaaaaaaaaaaaaaaaa

SEQ ID NO: 147 - DNA, 1793 bp, Artificial Sequence
  SERPINB3
aaatactaaccacagagggagaggcagcaagaggagaggcataaattcaggatctcacccttcattccacagacacacatagcctctctgcccacctctgcttcctctaggaacacaggagttccagatcacatcgagttcaccatgaattcactcagtgaagccaacaccaagttcatgttcgacctgttccaacagttcagaaaatcaaaagagaacaacatcttctattcccctatcagcatcacatcagcattagggatggtcctcttaggagccaaagacaacactgcacaacagattaagaaggttcttcactttgatcaagtcacagagaacaccacaggaaaagctgcaacatatcatgttgataggtcaggaaatgttcatcaccagtttcaaaagcttctgactgaattcaacaaatccactgatgcatatgagctgaagatcgccaacaagctcttcggagaaaaaacgtatctatttttacaggaatatttagatgccatcaagaaattttaccagaccagtgtggaatctgttgattttgcaaatgctccagaagaaagtcgaaagaagattaactcctgggtggaaagtcaaacgaatgaaaaaattaaaaacctaattcctgaaggtaatattggcagcaataccacattggttcttgtgaacgcaatctatttcaaagggcagtgggagaagaaatttaataaagaagatactaaagaggaaaaattttggccaaacaagaatacatacaagtccatacagatgatgaggcaatacacatcttttcattttgcctcgctggaggatgtacaggccaaggtcctggaaataccatacaaaggcaaagatctaagcatgattgtgttgctgccaaatgaaatcgatggtctccagaagcttgaagagaaactcactgctgagaaattgatggaatggacaagtttgcagaatatgagagagacacgtgtcgatttacacttacctcggttcaaagtggaagagagctatgacctcaaggacacgttgagaaccatgggaatggtggatatcttcaatggggatgcagacctctcaggcatgaccgggagccgcggtctcgtgctatctggagtcctacacaaggcctttgtggaggttacagaggagggagcagaagctgcagctgccaccgctgtagtaggattcggatcatcacctacttcaactaatgaagagttccattgtaatcaccctttcctattcttcataaggcaaaataagaccaacagcatcctcttctatggcagattctcatccccgtagatgcaattagtctgtcactccatttggaaaatgttcacctgcagatgttctggtaaactgattgctggcaacaacagattctcttggctcatatttcttttctttctcatcttgatgatgatcgtcatcatcaagaatttaatgattaaaatagcatgcctttctctctttctcttaataagcccacatataaatgtactttttcttccagaaaaattctccttgaggaaaaatgtccaaaataagatgaatcacttaataccgtatcttctaaatttgaaatataattctgtttgtgacctgttttaaatgaaccaaaccaaatcatactttttctttgaatttagcaacctagaaacacacatttctttgaatttaggtgatacctaaatccttcttatgtttctaaattttgtgattctataaaacacatcatcaataaaatagtgacataaaatcaaaaaaaaaaaaaaaaa

SEQ ID NO: 148 - DNA, 2347 bp, Artificial Sequence
  GJB2
ggggtgcggttaaaaggcgccacggcgggagacaggtgttgcggccccgcagcgcccgcgcgctcctctccccgactcggagcccctcggcggcgcccggcccaggacccgcctaggagcgcaggagccccagcgcagagaccccaacgccgagacccccgccccggccccgccgcgcttcctcccgacgcagagcaaaccgcccagagtagaagatggattggggcacgctgcagacgatcctggggggtgtgaacaaacactccaccagcattggaaagatctggctcaccgtcctcttcatttttcgcattatgatcctcgttgtggctgcaaaggaggtgtggggagatgagcaggccgactttgtctgcaacaccctgcagccaggctgcaagaacgtgtgctacgatcactacttccccatctcccacatccggctatgggccctgcagctgatcttcgtgtccacgccagcgctcctagtggccatgcacgtggcctaccggagacatgagaagaagaggaagttcatcaagggggagataaagagtgaatttaaggacatcgaggagatcaaaacccagaaggtccgcatcgaaggctccctgtggtggacctacacaagcagcatcttcttccgggtcatcttcgaagccgccttcatgtacgtcttctatgtcatgtacgacggcttctccatgcagcggctggtgaagtgcaacgcctggccttgtcccaacactgtggactgctttgtgtcccggcccacggagaagactgtcttcacagtgttcatgattgcagtgtctggaatttgcatcctgctgaatgtcactgaattgtgttatttgctaattagatattgttctgggaagtcaaaaaagccagtttaacgcattgcccagttgttagattaagaaatagacagcatgagagggatgaggcaacccgtgctcagctgtcaaggctcagtcgctagcatttcccaacacaaagattctgaccttaaatgcaaccatttgaaacccctgtaggcctcaggtgaaactccagatgccacaatggagctctgctcccctaaagcctcaaaacaaaggcctaattctatgcctgtcttaattttctttcacttaagttagttccactgagaccccaggctgttaggggttattggtgtaaggtactttcatattttaaacagaggatatcggcatttgtttctttctctgaggacaagagaaaaaagccaggttccacagaggacacagagaaggtttgggtgtcctcctggggttctttttgccaactttccccacgttaaaggtgaacattggttctttcatttgctttggaagttttaatctctaacagtggacaaagttaccagtgccttaaactctgttacactttttggaagtgaaaactttgtagtatgataggttattttgatgtaaagatgttctggataccattatatgttccccctgtttcagaggctcagattgtaatatgtaaatggtatgtcattcgctactatgatttaatttgaaatatggtcttttggttatgaatactttgcagcacagctgagaggctgtctgttgtattcattgtggtcatagcacctaacaacattgtagcctcaatcgagtgagacagactagaagttcctagtgatggcttatgatagcaaatggcctcatgtcaaatatttagatgtaattttgtgtaagaaatacagactggatgtaccaccaactactacctgtaatgacaggcctgtccaacacatctcccttttccatgactgtggtagccagcatcggaaagaacgctgatttaaagaggtcgcttgggaattttattgacacagtaccatttaatggggaggacaaaatggggcaggggagggagaagtttctgtcgttaaaaacagatttggaaagactggactctaaagtctgttgattaaagatgagctttgtctacttcaaaagtttgtttgcttaccccttcagcctccaattttttaagtgaaaatatagctaataacatgtgaaaagaatagaagctaaggtttagataaatattgagcagatctataggaagattgaacctgaatattgccattatgcttgacatggtttccaaaaaatggtactccacatatttcagtgagggtaagtattttcctgttgtcaagaatagcattgtaaaagcattttgtaataataaagaatagctttaatgatatgcttgtaactaaaataattttgtaatgtatcaaatacatttaaaacattaaaatataatctctataataatttaaaaaaaaaaaaaaaaa

SEQ ID NO: 149 - DNA, 2282 bp, Artificial Sequence
  CYTIP
gttgtacttttagcttcccccatcctgcaaggccactcaaccatgtgctagctggagtgatctttattcacaatgtctttacaaaggctcctgcaacacagcagcaatggcaatttggcggacttctgcgctgggccagcgtatagctcttactccacactcaccggcagccttacgatggacgataatagaaggattcaaatgctagcagacacggtggctactctgcctcggggacgaaagcagcttgctttgaccagatcaagttctttaagtgacttttcctggtctcaaagaaagcttgttactgtggagaagcaggataatgaaacatttggatttgaaattcagtcttacaggccccagaatcagaatgcctgctcctcggaaatgttcactttgatatgcaaaatacaggaggacagcccagctcactgtgctggcctgcaagctggtgatgtccttgcaaatatcaatggtgtgagcacagaaggttttacctacaaacaagtcgttgacctgatcagatcgtccggaaacctgctaacgatagagactcttaatggaacaatgattctgaaaagaacggagcttgaagcaaagctgcaggttttaaagcaaactttgaaacaaaaatgggtggagtacagatctctgcagttacaggaacatcgtctgcttcatggtgatgcagctaattgccccagtttggaaaacatggacttggatgaattgtctttgtttggacccctgcctgggccaggcccagcccttgtggaccggaatcgattatccagtgagagcagctgtaagagctggctgagctccatgacgatggacagtgaagatggctaccagacgtgtgtgtctgaggactccagcaggggtgccttcagtcggcagacgagtacagatgatgagtgctttatccccaaggagggggatgattttctgaggaggtcatcttcaaggaggaaccggagcatcagtaacaccagcagcggatccatgtctcccttgtgggagggcaacttatcaagcatgtttgggaccctgccccggaagagcagaaagggaagtgtccgaaagcaactcttgaaatttatccctggccttcatcgtgctgtggaagaggaagaaagtcgcttttgacggattgtggtgtcctttcaaattagcttatttcacaaatatctctagactcacccagatcccagcttggtgggaaagtgcagaagaattgcaaaactgacatcccatttcacagcaatagtgacctttatttaaattgttgtgttatagtttatgcttcttaaatcatttttcaacctaaacagccaatttctaagcagacaggaaaactaaataataagttaattaatataacaaagatgcaggttcctgctcattccagtaatgtctttgaaagcaaaactaatatttattttctagattatccctgtgaataattgagaactttttggagtcaagtatgaataaaggtgtggcagaatataataatctggactattttctataggataattgctgggttataaaatcttaggtttgcttatgcccagtagctcctgcggaggcttaataataggcaattttgaatttgttcaaacctgtaatggcttgtaaacaaagatgaccatcagctgtttctcacatctatagtgacaataaagcgggaagtataagatttaataggaggggttaaggttcatgagaaccatggaaagatgtggtctgagatgggtgctgcaaagatcataataaagtcatttttatagacagtctaaacaaaatgggtggggatgtcgtgttttttgcccaattcagcttttgttctgcctgaacattaatggcaagtctagaactctccgaatcctacagctttgtaattttttttctacaaatgtctaacatccaaaactgagggttgggaaaaggacttccctcctgtagtttttttcatattacttctcactttatatcttatattctaaatagctatcacctcagcagtcttttgcctattggttatgttagtatcacattacttctagcctttcaattactccatgttttatttaatatccattgaagtctatgaattctctgttctggtggcacagctattcataacctatattctagagtagacaatctggactatgtaataaatagtctgctgattttaaaaaaaaaaaaaaaaaaaaaaaaaaaaaaaaaaaaaaaaaaaaaaaaaaaaaaaaaaaaaaaaaaaaaaaaaa

SEQ ID NO: 150 - DNA, 6330 bp, Artificial Sequence
  ST18
cgcttgttcgctcactctcagtgaaaagagttttgaaatgagttctgaatagacagcattttctttgtgcggttggtaaataacacagagcaaagttagcaagttgcagcgcctctgcgttctgattctatggaacctttttgtagggagaagggcaggatgtttttaactgaatgtgacctcaggggaatactagagaaaataataaaatttctgaatggggcagcgtggagaaatcctaagagaaatagcataagagcattttggaacacatccaggaaaagataactttcgacacacctgtagacgttcgccaggtaaaggagtgatggaaactctccagttcagatccagtagcttttagggaaggaactacagttgctgacttaagttgaagaagcatctatttaatgtctggtcaaatcctacaagaaacacagaaatctatgattaaaaagctgagcactttgatatactgcaaagggtagagaaggcaggacggtagaaattttctgcaagaaagaatgaatttcaggatttatcactaaataagacaaagtcatttatttagtccccctgacacagcagggcaaactgagttgacatacaagttacctggagaaaaagagagcaattccaggacttcctcttcagcctaaaagaaggtaccagatctgtgcactggggcgatgtggaagagacctgcttattgcccctgatgtaagctccagtaagaaaagacgtcaagtacaagtactaggaaatcactttatacatctgtttataggaatgacctcaggactttgtgttcatgttatagatggatgcagaggctgaagataaaacgctgcgtactcgctctaaaggaaccgaggtgccaatggattcactaatccaggagctcagtgttgcctatgattgctccatggcaaagaagagaacagctgaagatcaggctttgggggttccagtcaacaaaaggaaatccctgctaatgaagccccgacactacagcccaaaagcagactgccaagaagaccgcagtgacaggacagaggacgatggccccttggaaacacatggtcactctaccgcagaggaaatcatgataaaacctatggatgaaagtcttctttcaactgcacaagaaaactccagtaggaaggaagacagatactcttgttatcaagagctcatggtcaagtctttaatgcacttggggaaatttgaaaaaaatgtatctgttcagactgtaagtgaaaatttaaatgacagtggcatccagtctttaaaagcagagagcgatgaagcagacgagtgctttctgattcattctgatgatggaagagacaagattgatgattctcagccacccttctgctcctctgatgacaatgaaagtaactctgaaagtgcagaaaatggctgggacagtggctccaacttctcagaagaaaccaaaccacctagagtcccaaagtatgttttaacagatcataaaaaagacctattggaagttcctgaaataaaaactgaaggtgacaaatttatcccttgtgagaacaggtgtgattctgaaacagaaaggaaagacccgcagaatgctctcgcagaacccctggatggcaatgcccagccctcattccctgacgttgaggaggaagatagcgagagcctggcagtaatgacggaagagggtagtgacctggaaaaggccaaggggaatttaagtttgctggagcaggcaattgctctgcaggctgagcgaggttgtgttttccataacacctacaaagagctggataggttcctgctggagcacctagcaggggaaaggaggcaaaccaaagttatcgacatgggtggaagacaaatctttaacaataaacattcaccaaggcctgaaaagagggagaccaagtgcccgatccctggatgtgatggcacgggacacgtgacagggctctacccgcaccaccgcagcctttcggggtgcccccacaaagtgcgggttcccctggaaattcttgccatgcatgaaaatgtgctcaagtgtcccacgccgggatgcacaggaaggggtcatgtgaacagcaaccgcaacacccacaggagtctttctggttgtccaattgctgcagctgaaaaattggcaatgtcccaggataaaaatcagcttgattctccccaaactgggcagtgtcctgaccaggcccacaggacaagtttggtgaagcaaattgaattcaatttcccgtcacaagccatcacctctcccagagccacagtgtcaaaagaacaagagaagtttggaaaagtaccatttgattatgccagttttgatgcccaagttttcggtaaacgccctctcatacaaacagtgcaaggacgaaaaacaccaccatttcctgaatcaaagcattttccaaatccagtgaaatttcctaatcgactgcctagtgcaggcgcccacacccagagccctggccgtgccagctcttatagctacggtcaatgtagtgaagacacccacatagcagcagctgctgccatcctgaacctttccacccgctgcagggaagccacagacatcctctccaacaagccacagagtctgcatgccaagggagccgaaatagaagtggatgaaaatggcacattggacttaagcatgaaaaaaaatcgaatcctggacaagtctgcacccctaacttcctctaacacttctattccaactccttcctcttccccattcaaaacaagcagcattctggtcaatgcagcattctatcaggctctttgtgaccaagagggctgggacactcctatcaactatagcaaaactcacgggaagacagaggaggagaaagagaaagacccagtgagctctctagaaaatttagaggaaaaaaagtttcctggagaggcctctataccaagccctaaacccaagcttcatgcaagagatctcaaaaaggaactaatcacctgtccaacaccaggatgtgatggaagtggccacgtgacaggaaactatgcatctcatcgcagtgtttctggatgtcctttagcagataagactctaaaatccctcatggctgccaactctcaggagcttaagtgtccaaccccaggctgcgatggctcggggcacgtgactggaaactatgcttcccacagaagcttgtccggatgccctcgtgcaaggaaaggtggtgtcaaaatgacccctaccaaggaagaaaaagaagaccctgaactgaaatgtcctgtgatagggtgtgatggccaaggtcacatatcaggtaaatacacatcacaccgcacagcttctggctgtcctctggctgccaagagacagaaggagaatcctctcaatggagcctccctctcctggaaactgaacaaacaagagctaccacattgtcccttgccaggctgcaatgggctgggccatgtaaataatgtttttgtcacccaccgaagcttatctggatgtcctctcaatgcacaagttatcaaaaagggcaaggtttctgaagaactcatgaccatcaagctcaaagcaactgggggaatagagagtgatgaagaaattaggcatttggatgaagaaataaaggaactgaatgaatccaaccttaaaattgaagcagatatgatgaaacttcagacccagatcacatctatggagagcaacttaaagacgatagaggaggagaacaaactcatagaacagaacaatgaaagtctgctgaaagagctggcaggtctaagccaagctctcatttcaagccttgctgacatccagcttccacagatgggacctatcagtgagcagaattttgaagcatatgtaaatacactcacagatatgtacagcaatctggaacgggactattccccggaatgcaaagctctactggaaagtatcaaacaggcagtgaagggtatccatgtgtaggatcacagcgctgccgggcaacagaagttaccaacagcagtaaactccagatggatctgttagaggttcatgtactgctaaggcgtggaggttgccgtactgcatttacaatttgcaacattgcactaattttattttccccagctgatataaaaaggaaagaaaaactatgatagacttcttggattaaaagcaatgcagtcaattattagatcttatttattttcatatgtttttcttttatttcttcattgtactctttttttttttgtaaagtatatgtaaaataaatgtgacatttttataatttatttattactaatcaaagagttttttatcttttaactgcattttgaagtctgccgtatttttacaagtgtgtttattaatttattttccaataggatttaaatagaaatgctattctcaagtcatctttcttgctgggttttaatgaggaaacaggaaagggtgaaggaaatccttgtctaaggactgcactatagttgagtttgatttttattgcacacttcttcccccacctttcactgatttttgtatttataaatgaatttgcggtaaggtgagctgcacggaaggaataagaagacaaatggcgcccactagtggggaatccgcactcacaaaagcacaggatgctggaaaacagcctgctcagaatttgttagcaataattaaatatagcaatcagcaaagtattcgacttggctggacggttttcgttaatatgaattatttatttgaaatgttttaaagaaacataagcctttttagtgatgcagatttgtctgtttgtttttcaagtcatatcagatcgttggcaactcgtatcccaagatgaaaaataagacttggtgtgaccagccaggctttcctgccatatgttggtacaatatacaagtgacaatattggtgtagatttgtacttagcaaatacaaacacatccaaatgaaaaattttgtagataccatatcccctgaaatagcatttatcttactgggttgactggaaaggaatggaaaatatagtaacacatgaaaaaatgctactccaatctgaatgattacttcaaacactggcaccttgggtctcacccaccataggaaacaagacaacattcaatttgatagaaatcttgccacaaaacttcaaatgctacaaaatatacacacacactcacacacacaggcatactcacacacagacacacacacacacacacacacagactcatccacacttcaaattgagcccacaatcttgaatttctgaacggatcagagtttcatagtttctatagtaaaggcaatgtctatttcagggattgtaaagtagttaagcattgtttcaaaagtttttttatatttattttttttaaggaaaaggtatagacaaccagctaaactgcctttttggtgtgcacacacatttcatgtgcagacgtgcctctgtgtaaatgtacacatgaacttcatgtgggcttaattttctgtgctataaacaaaagtgtttattttttattaacctcatggatatttagatggaaagtgatggcattcacaggcttgatgtattccactgttattactgttacctgcacaaatgaaaaacaatactcaacagtaattccactcccatgaaactttggtcattgttatgcattaagtggggcttatctttggtttggagttcatttgaactcttgaaccttagtttagtgaagatgaactgtctgttcttaggtagaaacggtgtttatttaaaaatcagttttaaaaaatgagctaccatatgtgctgtctattataaatgggacaccaaacaaaattttctattacagttgtgtacttgcaaacattttgctatacagtacttcatagatgcatacaaatgagctcacttattacaaagacaaacgtttaatttgctaaatattttaacaagtttgttatatattttatttaatttaaaagaaatctcttaccaacctacatatttattactataatttgctatgacttcaggttaatttatttgtgtttgcatagtttgagcaggatgttttgtgaagtatgtttgtatttatttgcctactttgtacttgatgtgttttgtaatgtgcactgaatttgttttcttttcaactatgttaatgatcaatactgtaaattgggtcttttgtaaacaaaaaggcaatgatgtatgcattttttttaatttgaggtagtttgtttgtatactgtttctccaaacacttaatatttcttacatcaaagcaacaaaattgtgttcagtgctgtacatttggtgtatggtaggaaataaaaattgataacgagttttg

SEQ ID NO: 151 - DNA, 5482 bp, Artificial Sequence
  CADPS
ggctgcatcgacagcttgcaacactcggcatcttttctggaggcgcctccttcagcagccgcagatggcatccggctgcgggctcggggctcgcaattgattctcccccttgcccacctcgagtccacggacgcacctctcccttcccctcctcccttcgcgcttctgggtctgagcccagctcgcgaccgccgggcagaggatcagtcgcggcggccgaggctgagcagcagcgctctcgctccctgacctggggagaagcgcccacccgggagagctgatccccggctgcctccagcgccccccaccttttgcactccaagccgggggctccagagaccccgctccccaggcgccactatgctggacccttcgtccagcgaagaagaatcggatgagatcgtggaggaggagagcggcaaggaggtgctcggctcggccccgtccggcgcgcgcctgtctcccagccgtaccagcgagggctcggccggcagcgccgggctggggggcggcggcgccggcgccggagccggggtgggtgcaggcggcggcgggggcagcggcgcgagcagcggcggcggggccggggggctgcaacccagcagccgcgctggcggcggccggccctccagccccagcccgtcggtggtgagcgagaaggagaaggaagagttggagcggctgcagaaagaggaggaggagaggaagaagaggctgcagctgtatgtgttcgtgatgcgctgcatcgcctacccctttaatgccaagcagcccaccgacatggctcgccggcagcagaagatcagcaaacagcagctgcagacagtcaaggaccggtttcaggctttcctcaatggggaaacccagatcatggctgacgaagccttcatgaacgctgtgcagagttactatgaggtgttcctgaagagcgaccgtgtggcccgcatggttcagagtggaggctgttccgccaacgactcccgggaggtcttcaagaagcacattgagaagagagtgcgcagcctgcctgagattgacggcctcagcaaggagactgtgctgagctcctggatggccaaatttgatgccatctaccgtggagaagaggacccgcggaagcagcaggcccggatgacagccagcgcagcctccgagctgattctgagcaaggagcaactctatgagatgttccagaacattcttgggatcaagaagttcgaacatcagctcctttacaatgcctgccagctggacaatccagatgagcaagcagcccagatcagacgagagctggatggacgtctacaaatggcagaccaaatagccagggaacgcaaatttcccaagtttgtatccaaagaaatggaaaacatgtacattgaggagctgaagtcatctgtcaacctgctcatggccaacttggagagcatgccggtatccaaaggcggggagttcaagctccagaaactcaaacgcagccacaatgcttccatcatcgacatgggcgaggagagtgagaaccagctctccaagtcagatgtcgtgctgtctttctcattggaggtggtaattatggaagtccaaggcctcaaatctttggctccaaatcgcatcgtatattgcacaatggaggtggaaggaggagagaaactacagactgatcaggccgaggcttctaaaccaacctggggcacccagggtgacttctccacaacccatgcactgccagctgtgaaggtgaagctgttcacagagagcacaggcgtcctggcgttggaggacaaggagcttgggcgggttattctccatcccaccccgaacagccccaaacagtcagagtggcacaaaatgacagtctccaaaaactgccccgaccaagatctcaaaatcaaacttgctgtccgaatggataagcctcaaaacatgaagcattctgggtatttatgggccatcggtaagaatgtctggaagagatggaagaaaaggttttttgtattggtgcaggtcagtcagtacacgtttgccatgtgcagttatcgggagaagaaagcggagcctcaggaacttctacaattggatggctacactgtggattacaccgacccccagccaggtttggagggtggccgagccttcttcaatgctgtcaaggagggagacaccgtgatatttgccagtgacgatgaacaagaccgcatcctgtgggtccaggccatgtatcgggccacggggcagtcacacaagcctgtgcccccgacccaagtccagaaactcaacgccaagggaggaaatgtacctcagctggatgcccctatctctcaattttacgcagatagagctcaaaaacatggcatggatgaatttatctcttccaacccctgtaactttgaccacgcttccctctttgagatggtacaacgccttactttggatcacagacttaatgattcctattcttgcctgggctggttcagtcctggccaggtgtttgtactagacgagtattgcgcccgaaatggagtccgggggtgtcaccgacatctctgctacctcagagacttgcttgaacgggcagaaaatggcgccatgatcgaccccacccttcttcactacagctttgccttctgtgcatcccatgtccatgggaacaggcctgatggaattggaactgtgactgttgaagaaaaggaacgttttgaagaaatcaaagagaggctccgagttctgctagaaaatcagattacacattttaggtattgctttccatttggtcgacctgaaggtgctttgaaagctactctctcactcttggaaagggttttgatgaaagatattgttaccccagtgccacaagaggaggtaaaaacagttatccgtaaatgtctggaacaggctgcgttagtcaactattctcggctctcagagtatgccaaaatcgaagagaatcaaaaggatgcagaaaatgtaggccggttaatcactcctgccaaaaagcttgaagatacaatacgtcttgctgaactagtcattgaagttcttcagcaaaatgaggagcaccacgcagagccacatgttgataaaggagaagcctttgcgtggtggtcagatttaatggtggagcatgcggagacgttcctgtcactctttgcagtagacatggatgcagccttagaggtgcaacctccagacacatgggacagttttccactatttcagctgctgaatgattttctccgtactgactataatttgtgcaatggaaaatttcacaaacacctgcaagacctgtttgccccacttgttgttagatatgtggatctgatggagtcctcaattgcacaatccattcacaggggctttgagcgggagtcatgggaaccagtcaagagtttaaccagtaacctacccaatgtgaacctacccaatgtgaaccttcccaaagtaccaaatctaccagttaacatccctctaggcatcccacaaatgcctactttttcggcaccgtcatggatggctgctatatatgatgcggataatgggtcaggcacctcagaagatctgttttggaaacttgacgcccttcagaccttcattcgggacctgcactggcctgaagaagagtttggaaagcacctggaacaacggctgaagttgatggcaagtgacatgatcgaatcttgtgtcaaaagaaccaggattgcatttgaagttaagctgcaaaaaaccagtcgatcaacagattttcgagtcccacagtcaatatgcaccatgtttaatgttatggttgatgccaaagctcaatcaacaaaactttgcagcatggaaatgggccaagagcatcaataccattcaaaaatagacgaactaattgaagaaactgttaaagaaatgataacactcttggttgcaaagttcgttactatcttggaaggagtgctggcaaaattatccagatatgacgaagggactttgttttcttcttttctgtcatttaccgtgaaggcagcttccaaatatgtggatgtacctaaacccgggatggacgtggccgacgcctacgtgactttcgtccgccattctcaggatgtcctgcgtgataaggtcaatgaggagatgtacatagaaaggttatttgatcaatggtacaacagctccatgaacgtgatctgcacctggttgacggaccggatggacttacagcttcatatttatcagttgaaaacactaattaggatggtaaagaaaacctacagagatttccgattgcaaggggtcctggactccaccttaaacagcaagacctatgaaacgatccggaaccgtctcactgtggaggaagccacagcatcagtgagtgaaggtgggggactgcagggcatcagcatgaaggacagcgatgaggaagacgaagaagacgattagaccatttggtcctagagtctgctgggacagagtcctgtaatcagtgcatgtccttagtctgttagttaaacccattaggaattttctgtcaactaccatgcccatgagatgtttatcaatacaactgccattttagctatgtggtaccaagattagcaaatgaccttcatatccactgatttcctgatgtccatgtctatatgtttacaagcaatatggagcaccattctttaaatactgttcatggagaatacatagtctaaccactaggcgtgtccctgttatcagcaaagatcaatgatgcttcattcatgtactatgtatgcattggtggtaaatggatgtgagggcaagtacatcaagtacattcactctgtttcacgtatgtggatgccagttaattaaatgagtacgtaaataaattaattaaaacacatagatctgctttgtgtttttatttttattttttgaaaaacaaaaggcaagtctccaacaattaacttttgatgctttctgttcccctaaaaccaaaaaatgaaccccttgtgtcgttgttaacccatcctttcatttactcatataattagccaaaaaaaaaaggatggctacataccaatggattgattctcttaattgccacggcaagggggcgatcctatcatgacttaacatcaagcgcgcagttcaaaactactgtcttctgtcaaagttttctcctcttaaatgttattttgcttttacgtctcaactgtgtatgtaaaaaaaatgaatatttaaattacaaccctagactaaaaatgtgtttataataagatgtggatatttccttcagtagattgtaaccataatttaaattattttgttccacactgttttttatatctgtcatgtacattgcattttgatctgtaactgcacaaccctggggtttgctgcagagctatttctttccatgtaaagtagtggatccatcttgcttttgccttatataaagcctacagttatggaagtgtggaaaactgtggcttctcaataaatattcagatgtcctaagaatata

SEQ ID NO: 152 - DNA, 8450 bp, Artificial Sequence
  AKAP12
gggactcggactcgctcctgggcgagctgaaagtcggctgcagcagaagctcctgccttgggagtttgccgcgagcgcgtctccttcattcgcaggctgggcgcgttcgcagtcggctggcggcgaaggaaggcgctctcgggacctcgcgggcgcgcgtcttttggctcttgcccctgtccctgcggcttggggaaggcgtaacccggcggctaggcgcgggagaagtgcggaggagccatgggcgccgggagctccaccgagcagcgcagcccggagcagccgcccgaggggagctccacgccggctgagcccgagcccagcggcggcggcccctcggccgaggcggcgccagacaccaccgcggaccccgccatcgctgcctcggaccccgccaccaagctcctacagaagaatggtcagctgtccaccatcaatggcgtagctgagcaagatgagctcagcctccaggagggtgacctaaatggccagaaaggagccctgaacggtcaaggagccctaaacagccaggaggaagaagaagtcattgtcacagaggttggacagagagactctgaagatgtgagcaaaagagactccgataaagagatggctactaagtcagcggttgttcacgacatcacagatgatgggcaggaggagacacccgaaataatcgaacagattccttcttcagaaagcaatttagaagagctaacacaacccactgagtcccaggctaatgatattggatttaagaaggtgtttaagtttgttggctttaaattcactgtgaaaaaggataagacagagaagcctgacactgtccagctactcactgtgaagaaagatgaaggggagggagcagcaggggctggcgaccacaaggaccccagccttggggctggagaagcagcatccaaagaaagcgaacccaaacaatctacagagaaacccgaagagaccctgaagcgtgagcaaagccacgcagaaatttctcccccagccgaatctggccaagcagtggaggaatgcaaagaggaaggagaagagaaacaagaaaaagaacctagcaagtctgcagaatctccgactagtcccgtgaccagtgaaacaggatcaaccttcaaaaaattcttcactcaaggttgggccggctggcgcaaaaagaccagtttcaggaagccgaaggaggatgaagtggaagcttcagagaagaaaaaggaacaagagccagaaaaagtagacacagaagaagacggaaaggcagaggttgcctccgagaaactgaccgcctccgagcaagcccacccacaggagccggcagaaagtgcccacgagccccggttatcagctgaatatgagaaagttgagctgccctcagaggagcaagtcagtggctcgcagggaccttctgaagagaaacctgctccgttggcgacagaagtgtttgatgagaaaatagaagtccaccaagaagaggttgtggccgaagtccacgtcagcaccgtggaggagagaaccgaagagcagaaaacggaggtggaagaaacagcagggtctgtgccagctgaagaattggttgaaatggatgcagaacctcaggaagctgaacctgccaaggagctggtgaagctcaaagaaacgtgtgtttccggagaggaccctacacagggagctgacctcagtcctgatgagaaggtgctgtccaaaccccccgaaggcgttgtgagtgaggtggaaatgctgtcatcacaggagagaatgaaggtgcagggaagtccactaaagaagctttttaccagcactggcttaaaaaagctttctggaaagaaacagaaagggaaaagaggaggaggagacgaggaatcaggggagcacactcaggttccagccgattctccggacagccaggaggagcaaaagggcgagagctctgcctcatcccctgaggagcccgaggagatcacgtgtctggaaaagggcttagccgaggtgcagcaggatggggaagctgaagaaggagctacttccgatggagagaaaaaaagagaaggtgtcactccctgggcatcattcaaaaagatggtgacgcccaagaagcgtgttagacggccttcggaaagtgataaagaagatgagctggacaaggtcaagagcgctaccttgtcttccaccgagagcacagcctctgaaatgcaagaagaaatgaaagggagcgtggaagagccaaagccggaagaaccaaagcgcaaggtggatacctcagtatcttgggaagctttaatttgtgtgggatcatccaagaaaagagcaaggagagggtcctcttctgatgaggaagggggaccaaaagcaatgggaggagaccaccagaaagctgatgaggccggaaaagacaaagagacggggacagacgggatccttgctggttcccaagaacatgatccagggcagggaagttcctccccggagcaagctggaagccctaccgaaggggagggcgtttccacctgggagtcatttaaaaggttagtcacgccaagaaaaaaatcaaagtccaagctggaagagaaaagcgaagactccatagctgggtctggtgtagaacattccactccagacactgaacccggtaaagaagaatcctgggtctcaatcaagaagtttattcctggacgaaggaagaaaaggccagatgggaaacaagaacaagcccctgttgaagacgcagggccaacaggggccaacgaagatgactctgatgtcccggccgtggtccctctgtctgagtatgatgctgtagaaagggagaaaatggaggcacagcaagcccaaaaaagcgcagagcagcccgagcagaaggcagccactgaggtgtccaaggagctcagcgagagtcaggttcatatgatggcagcagctgtcgctgacgggacgagggcagctaccattattgaagaaaggtctccttcttggatatctgcttcagtgacagaacctcttgaacaagtagaagctgaagccgcactgttaactgaggaggtattggaaagagaagtaattgcagaagaagaaccccccacggttactgaacctctgccagagaacagagaggcccggggcgacacggtcgttagtgaggcggaattgacccccgaagctgtgacagctgcagaaactgcagggccattgggtgccgaagaaggaaccgaagcatctgctgctgaagagaccacagaaatggtgtcagcagtctcccagttaaccgactccccagacaccacagaggaggccactccggtgcaggaggtggaaggtggcgtacctgacatagaagagcaagagaggcggactcaagaggtcctccaggcagtggcagaaaaagtgaaagaggaatcccagctgcctggcaccggtgggccagaagatgtgcttcagcctgtgcagagagcagaggcagaaagaccagaagagcaggctgaagcgtcgggtctgaagaaagagacggatgtagtgttgaaagtagatgctcaggaggcaaaaactgagccttttacacaagggaaggtggtggggcagaccaccccagaaagctttgaaaaagctcctcaagtcacagagagcatagagtccagtgagcttgtaaccacttgtcaagccgaaaccttagctggggtaaaatcacaggagatggtgatggaacaggctatcccccctgactcggtggaaacccctacagacagtgagactgatggaagcacccccgtagccgactttgacgcaccaggcacaacccagaaagacgagattgtggaaatccatgaggagaatgaggtcgcatctggtacccagtcagggggcacagaagcagaggcagttcctgcacagaaagagaggcctccagcaccttccagttttgtgttccaggaagaaactaaagaacaatcaaagatggaagacactctagagcatacagataaagaggtgtcagtggaaactgtatccattctgtcaaagactgaggggactcaagaggctgaccagtatgctgatgagaaaaccaaagacgtaccatttttcgaaggacttgaggggtctatagacacaggcataacagtcagtcgggaaaaggtcactgaagttgcccttaaaggtgaagggacagaagaagctgaatgtaaaaaggatgatgctcttgaactgcagagtcacgctaagtctcctccatcccccgtggagagagagatggtagttcaagtcgaaagggagaaaacagaagcagagccaacccatgtgaatgaagagaagcttgagcacgaaacagctgttaccgtatctgaagaggtcagtaagcagctcctccagacagtgaatgtgcccatcatagatggggcaaaggaagtcagcagtttggaaggaagccctcctccctgcctaggtcaagaggaggcagtatgcaccaaaattcaagttcagagctctgaggcatcattcactctaacagcggctgcagaggaggaaaaggtcttaggagaaactgccaacattttagaaacaggtgaaacgttggagcctgcaggtgcacatttagttctggaagagaaatcctctgaaaaaaatgaagactttgccgctcatccaggggaagatgctgtgcccacagggcccgactgtcaggcaaaatcgacaccagtgatagtatctgctactaccaagaaaggcttaagttccgacctggaaggagagaaaaccacatcactgaagtggaagtcagatgaagtcgatgagcaggttgcttgccaggaggtcaaagtgagtgtagcaattgaggatttagagcctgaaaatgggattttggaacttgagaccaaaagcagtaaacttgtccaaaacatcatccagacagccgttgaccagtttgtacgtacagaagaaacagccaccgaaatgttgacgtctgagttacagacacaagctcacgtgataaaagctgacagccaggacgctggacaggaaacggagaaagaaggagaggaacctcaggcctctgcacaggatgaaacaccaattacttcagccaaagaggagtcagagtcaaccgcagtgggacaagcacattctgatatttccaaagacatgagtgaagcctcagaaaagaccatgactgttgaggtagaaggttccactgtaaatgatcagcagctggaagaggtcgtcctcccatctgaggaagagggaggtggagctggaacaaagtctgtgccagaagatgatggtcatgccttgttagcagaaagaatagagaagtcactagttgaaccgaaagaagatgaaaaaggtgatgatgttgatgaccctgaaaaccagaactcagccctggctgatactgatgcctcaggaggcttaaccaaagagtccccagatacaaatggaccaaaacaaaaagagaaggaggatgcccaggaagtagaattgcaggaaggaaaagtgcacagtgaatcagataaagcgatcacaccccaagcacaggaggagttacagaaacaagagagagaatctgcaaagtcagaacttacagaatcttaaaacatcatgcagttaaactcattgtctgtttggaagaccagaatgtgaagacaagtagtagaagaaaatgaatgctgctgctgagactgaagaccagtatttcagaactttgagaattggagagcaggcacatcaactgatctcatttctagagagcccctgacaatcctgaggcttcatcaggagctagagccatttaacatttcctctttccaagaccaacctacaattttcccttgataaccatataaattctgatttaaggtcctaaattcttaacctggaactggagttggcaatacctagttctgcttctgaaactggagtatcattctttacatatttatatgtatgttttaagtagtcctcctgtatctattgtatatttttttcttaatgtttaaggaaatgtgcaggatactacatgctttttgtatcacacagtatatgatggggcatgtgccatagtgcaggcttggggagctttaagcctcagttatataacccacgaaaaacagagcctcctagatgtaacattcctgatcaaggtacaattctttaaaattcactaatgattgaggtccatatttagtggtactctgaaattggtcactttcctattacacggagtgtgctaaaactaaaaagcattttgaaacatacagaatgttctattgtcattgggaaatttttctttctaacccagtggaggttagaaagaagttatattctggtagcaaattaactttacatcctttttcctacttgttatggttgtttggaccgataagtgtgcttaatcctgaggcaaagtagtgaatatgttttatatgttatgaagaaaagaattgttgtaagtttttgattctactcttatatgctggactgcattcacacatggcatgaaataagtcaggttctttacaaatggtattttgatagatactggattgtgtttgtgccatatttgtgccattcttttaagaacaatgttgcaacacattcatttggataagttgtgatttgacgactgatttaaataaaatatttgcttcacttagatttgctggttttattagataccaggaagcctgggacatatgtgtaccacattagaattctaaagataatgattgataagctagaactttctgatgtagtcattacatgaaaccccttgtcactggtttgtgtgttcagaggaagccatggccgagatagctttcctgaaataaaccagtagcttttcagattgacgttcttgctacaattgtaccatctggtaattcctgaaaatgtcaatttttttgtgttaatatttttggtttcaaacaataacaaatgtctctagaaagaaattttaagaaagcttaattaatagtaaaaatgcctttcctgaaataatcttggaaaattttttaaatgtcaaaatgatgagtcatgctaatacattgagggtttgtttttttgtttgtttgtttgtttgtttttgagacagagtttcgctcttgttgcccaggctggagtgcaatggcacgatctcagctcaccgcaacctccacctcccggattccagcgattctcctgcctcagcctacattaagggttttgtcagacaattgtcacacgaagaatagtgtcacttatctactcttgacacacagaactggcctggcatatagctttccagattttactcaaacttggtactccagtttgaaaatttaaattttgactgctgattagctggaaagcctagttttaatggaaagaaagtttgcttttaaaactgaaagtagtttctttttgctaacaaatctaacttcatacataattggccatattagtaaaacacctcatgatagcagtgtatatatagtcttgtttgtagttggaagtcatcttttaggagttattctcaaatatatataatagctacccatgcatcattattaaaatccccaaattcaaaaaacctctgatatatatatataatttttttttttttttttttttggccaactgagattgaaatccaagtgctggtttctagttctgaacatcaactaaagagttttggaaatgacagcaatttataacaagttcatattgacttcctctctatggcaggaagacattctgtgctgttttgaacagattaaagatttgtgtagtttgtgggaaattgacgtttttgtttaaattccacccgcgtttgtcttttcctaccacctgtggccaggtgctcgctggccatcacagttgcgattccatgagtagctgctttatgactgctttttgtactatctggatgtgcccagagttacttctgtacaagctctgtatctatgtccgttgagaacattattttaacaagaagaacaccaacagtagcatgaaatataatactgttttataattctaaagctgctgttaatttatgaagtacataataatctaatgtaaactgcagaagtcagagcaagtgcctacattttgttatttttggcattactacagagccatgtacaatagaaagcaatgcaagacttgtaaactctcaccacttcttgtaatatcaaatgttccccctcaggttattttgcttatggtacccatgagttgcctctctctgtacatagataaattgttccaatattttcctttgatgtttggaactacagatagtcaagggctggaaattttagttttcaatataagcttccagcttagcaattacctctagtcgaagacaatatttgattcctagttctgtttggggcaaattttcatttatctaaataaaatgcaatctaattaaatgccatggattttctttctgtaaaaaaaaaaaaaaaaaa

SEQ ID NO: 153 - DNA, 1753 bp, Artificial Sequence
  CA3
acataaaagcgcgggctcgcggcgactctgcaccacgcaggggaagagaaagcaggagccgtccagcacggaggaaggcgaccatggccaaggagtggggctacgccagtcacaacggtcctgaccactggcatgaacttttcccaaatgccaagggggaaaaccagtcgcccgttgagctgcatactaaagacatcaggcatgacccttctctgcagccatggtctgtgtcttatgatggtggctctgccaagaccatcctgaataatgggaagacctgccgagttgtatttgatgatacttatgataggtcaatgctgagagggggtcctctccctggaccctaccgacttcgccagtttcatcttcactggggctcttcggatgatcatggctctgagcacaccgtggatggagtcaagtatgcagcggagcttcatttggttcactggaacccgaagtataacacttttaaagaagccctgaagcagcgcgatgggatcgctgtgattggcatttttctgaagataggacatgagaatggcgagttccagattttccttgatgcattggacaagattaagacaaagggcaaggaggcgcccttcacaaagtttgacccatcctgcctgttcccggcatgccgggactactggacctaccagggctcattcaccacgccgccctgcgaggaatgcattgtgtggctgctgctgaaggagcccatgaccgtgagctctgaccagatggccaagctgcggagcctcctctccagtgctgagaacgagcccccagtgcctcttgtgagcaactggcgacctccacagcctatcaataacagggtggtgagagcttccttcaaatgaggctgctggatcttgccctcttcaggaaaggaaacctaccattggagagcttggttccttgcctccttctggtgctccttactccaagtctatttcatttttccacactgagcaatgaatgtgagagatgtggtcaccaagatctaagttacttgttgaaagaaagttactttcgacaagatctaatatgaaagcatagatttcacatttgatctctgtaataatcatctttcctataaaagtagcatttttggtaaagtttcaaagaagaagaaacagagatggaagagtaaagatatttttaaaatggctagctattgggcaccagtttttctgttatctaaaatttcacacaacttcattgtttttatttttatattatgagttgtccatcttaaagaaatatgagtaattctacatgtagtagaggtgtatgaagatcatataacaattaaacataagccagaaattaaaatgactatagacagcaagaattgagctaataatatgttttaactcttaacaccagcaagaagtcagtcatttattgaagttttagctactaagattacttggttttgattaccagtgaaaagaaaacacaatacaatcaggagttttcaaatttttgattcagtatttgaatttcttcttcataaatgtagttgaatttatcctagtatttttctttacctgaaggagggccatttatttttaatttcactacatttttctttgcatgattattaaaataaaaactgcctctgttgtgtttctcactggaggctggaatgaatgatcactagaacacaaaagagtgaatgatgacacttgaagtcaaagcagttgtactgatcaccagaaccaataaagacataaatggaaaa

SEQ ID NO: 154 - DNA, 1553 bp, Artificial Sequence
  LACTB2
acgtggacgctactcgctatccccggcctgttggcttcttccgcgctggagtatccagataggcgacacgccggcgggcggctgaggcgggaatggctgctgtactgcagcgcgtcgagcggctgtccaatcgagtcgtgcgtgtgttgggctgtaacccgggtcccatgaccctccaaggcaccaacacctacctagtggggaccggccccaggagaatcctcattgacactggagaaccagcaattccagaatacatcagctgtttaaagcaggctctaactgaatttaacacagcaatccaggaaattgtagtgactcactggcaccgagatcattctggaggcataggagatatttgtaaaagcatcaataatgacactacctattgcattaaaaaactcccacggaatcctcagagagaagaaattataggaaatggagagcaacaatatgtttatctgaaagatggagatgtgattaagactgagggagccactctaagagttctatatacccctggccacactgatgatcacatggctctactcttagaagaggaaaatgctatcttttctggagattgcatcctaggggaaggaacaacggtatttgaagacctctatgattatatgaactctttaaaagagttattgaaaatcaaagctgatattatatatccaggacatggcccagtaattcataatgctgaagctaaaattcaacaatacatttctcacagaaatattcgagagcagcaaattcttacattatttcgtgagaactttgagaaatcatttacagtaatggagcttgtaaaaattatttacaagaatactcctgagaatttacatgaaatggctaaacataatctcttacttcatttgaaaaaactagaaaaagaaggaaaaatatttagcaacacagatcctgacaagaaatggaaagctcatctttagtttcagattaaagaaagctttgttttattttgctttcagagaatggtatgttttcttaactataggttattttatagagaatataaaagtataaaacattaaaaataaccctagatatactttaaaataatgttatatttatgctaaaatatgtaaattacactatacaaccatatgataggttatttctctaaccttgtcttctaacgttttaccaaaaattcataatctaatagtttatcagttttcaatagattaaataaaatgattactttaaaaataataaaatttatctaatttaaagttgatattatttttggccgttagttatctattactagtgatcagttatactgttttctatagctactttatttaacagcacagatttctatgcacctttactctttcctcaacccttgtctctatctgtacataattgctttgtcttgatgtttctatcaactatatcatgactatctattggttccataactctgtatcatgtgtattttcttattctggtataccacaaatgattcatgcaaatgaatttttggtgattgaaaaatattaaattcccaatttaaagta

SEQ ID NO: 155 - DNA, 996 bp, Artificial Sequence
  AGR2
aatcacttggggaaaggaaggttcgtttctgagttagcaacaagtaaatgcagcactagtgggtgggattgaggtatgccctggtgcataaatagagactcagctgtgctggcacactcagaagcttggaccgcatcctagccgccgactcacacaaggcaggtgggtgaggaaatccagagttgccatggagaaaattccagtgtcagcattcttgctccttgtggccctctcctacactctggccagagataccacagtcaaacctggagccaaaaaggacacaaaggactctcgacccaaactgccccagaccctctccagaggttggggtgaccaactcatctggactcagacatatgaagaagctctatataaatccaagacaagcaacaaacccttgatgattattcatcacttggatgagtgcccacacagtcaagctttaaagaaagtgtttgctgaaaataaagaaatccagaaattggcagagcagtttgtcctcctcaatctggtttatgaaacaactgacaaacacctttctcctgatggccagtatgtccccaggattatgtttgttgacccatctctgacagttagagccgatatcactggaagatattcaaatcgtctctatgcttacgaacctgcagatacagctctgttgcttgacaacatgaagaaagctctcaagttgctgaagactgaattgtaaagaaaaaaaatctccaagcccttctgtctgtcaggccttgagacttgaaaccagaagaagtgtgagaagactggctagtgtggaagcatagtgaacacactgattaggttatggtttaatgttacaacaactattttttaagaaaaacaagttttagaaatttggtttcaagtgtacatgtgtgaaaacaatattgtatactaccatagtgagccatgattttctaaaaaaaaaaataaatgttttgggggtgttctgttttctccaaaaaaaaaaaaaaa

SEQ ID NO: 156 - DNA, 3122 bp, Artificial Sequence
  PAX9
ccctcccctgctctcgcaaggagaaagcgggcgacgagcgctcgcagcccgtggggctgatcccacctcccgcagggctccggtcgtgtcgctgtcggaccgcagaacgccgggacgcatttccgagctcgggcccgacccaacccgctgccattctagctacctagtggagccgcggagagactcttgaaccgtgaggctccttgatgagaaggtggagaggctgccgggctattctccgagcatcttccggccgagctctgctcctctccgtgcgcttgcggcttctccttgggctagcgcgtccgcagtccctccaagtccaggccgcagtcacccaggtggggagctagcctgaaagagacagcggaaggagtttcctggactgcgctgtcgctcaccgacccgcaccaatcaccatgcagcttgccctcggacccgccccttttagggcgtgtccccagtgagtgatagacggagccgccctgccctgctcagcccagcccacgttgctgcttagattgaaatgcagaactcaagcctctttcatcggggcacagacttccttttacttcttccttttgccctctcgcctcctcctcctgggaagaagcggaggcgccggcggtcggccgggatagcaacaggccgggccactgaggcggtgcggaaagtttctgtctgggagtgcggaactggggccgggttggtgtactgctcggagcaatggagccagccttcggggaggtgaaccagctgggaggagtgttcgtgaacgggaggccgctgcccaacgccatccggcttcgcatcgtggaactggcccaactgggcatccgaccgtgtgacatcagccgccagctacgggtctcgcacggctgcgtcagcaagatcctggcgcgatacaacgagacgggctcgatcttgccaggagccatcgggggcagcaagccccgggtcactacccccaccgtggtgaaacacatccggacctacaagcagagagaccccggcatcttcgcctgggagatccgggaccgcctgctggcggacggcgtgtgcgacaagtacaatgtgccctccgtgagctccatcagccgcattctgcgcaacaagatcggcaacttggcccagcagggtcattacgactcatacaagcagcaccagccgacgccgcagccagcgctgccctacaaccacatctactcgtaccccagccctatcacggcggcggccgccaaggtgcccacgccacccggggtgcctgccatccccggttcggtggccatgccgcgcacctggccctcctcgcactccgtcaccgacatcctgggcatccgctccatcaccgaccaagtgagcgacagctccccctaccacagccccaaggtggaggagtggagcagcctgggccgcaacaacttccccgccgccgccccgcacgcggtgaacgggttggagaagggagccctggagcaggaagccaagtacggtcaggcaccaaatggtctcccagctgtgggcagttttgtgtcagcatccagcatggctccttaccctaccccagcccaagtgtcgccttacatgacctacagtgctgctccttctggttatgttgctggacatgggtggcaacatgctgggggcacctcattgtctccccacaactgtgacattccggcatcgctggcgttcaagggaatgcaggcagccagagaaggtagtcattctgtcacggcttccgcgctctgatgggaaattccgtctccagcagcttcacccgggtctccctgtctcagcacctcctcccccaattcccaggtctcacatcccacccctcctgccctccaacccttctgccttgaaagctggctgtacggactcacatcctttgtgctaatgacacttacatatttcttgccataacttttctcttgcagaaaaactgacatgactttaggatttaaaaacaagagcaacaataagcattgaatgagacatttgtgttgcccacatactgtcttaacataacaaagaaacctacacccctcaaagggtttaaggaactttacaaactagtctttggtaaaaccacatgtgtatatttattctaaatcaacctgaacttttgaaatgtgcaattgttgagattttgcaaaatcaataaaggaaaatacttatagaaaaaattatgctacaccctctaatcaaatatggtaaccaagtaagctttaattcatcattaggaaacaaatcaataagtgacttgtttgagtgatcctttgtttaagacatgacctattttgttgaaaaatatatgtagaacccaagcaatatctgaatctagctctccctggtgttttgacttggttccaaatacaataatgtttatattttctattagtttgtaaatacggactctggatggtgcatttgtgtcttcattccataagatattcccctcccctcagccccaccccctctctatttttttctttcttttttgcaaaggtgactttctggcaacgtctttgtctctgtttggtggtgggctgctcgggctcctggacctggacttgcccccaaattttgtgtatgcagtgaaggcttcaacatctcatgaaggacactttatttctacagcagaggacacgaaaaacagataaaacaagccagtctcccattttgtacctaatcaaacaacacacatgctaagcatataaagacaagagggtggaaaatatctgaacaagaaggctctaaaggaagtcacttagaaacttaagtttaatgtgaaatgttttgcaaagatgcttaaaatgaactttgtgttaagaaaaccactgtgaaactaaattgtcctattattgttggcttacctgtgtgttcagcaatctcagccccaaataatgttgtaatttaaagaaaatggaaaattctgctctaatgaatgtaacaatggcttgctgtgaagtttacattgttgtacagaagcatgtttcgcatgtaggtaaactggtggtggtactagaaatacaatgttatttaattttaacaaattccctttattcatttctgaaattacaggacacagtttaactcataaaaaaaaaaaaaaaaaa

SEQ ID NO: 157 - DNA, 5802 bp, Artificial Sequence
  GABBR2
gccgcccctgagcagcctcgccttcgcctcccgcgtttcctgccgtccgccctcccccggccgagctccaggggctgccgcctagcagctcccggcgggagagcggttcagagcgcgcacgggggcgggcggaggcggcccggtgcggggcggccgcgctggagagaggcgcgcgcggagacgccggcccccctctccgcgtttgctcgcttgctccccgcctcccgcactccgctcgctcccaccccttcccggcgtgattgatccgtcacgggcgccgccgctgccgccgccgccgccgcggccgttctgagccgagccggaaccctagcccgagacggagccggggcccgggccggcgccattgcgcgggcgccgcgggaagaccttggcgcggggcggcgggccgggccaggccatgcgggccgagtgagccggcgcccgcagcccgcggcgcggcatggcttccccgcggagctccgggcagcccgggccgccgccgccgccgccaccgccgcccgcgcgcctgctactgctactgctgctgccgctgctgctgcctctggcgcccggggcctggggctgggcgcggggcgccccccggccgccgcccagcagcccgccgctctccatcatgggcctcatgccgctcaccaaggaggtggccaagggcagcatcgggcgcggtgtgctccccgccgtggaactggccatcgagcagatccgcaacgagtcactcctgcgcccctacttcctcgacctgcggctctatgacacggagtgcgacaacgcaaaagggttgaaagccttctacgatgcaataaaatacgggcctaaccacttgatggtgtttggaggcgtctgtccatccgtcacatccatcattgcagagtccctccaaggctggaatctggtgcagctttcttttgctgcaaccacgcctgttctagccgataagaaaaaatacccttatttctttcggaccgtcccatcagacaatgcggtgaatccagccattctgaagttgctcaagcactaccagtggaagcgcgtgggcacgctgacgcaagacgttcagaggttctctgaggtgcggaatgacctgactggagttctgtatggcgaggacattgagatttcagacaccgagagcttctccaacgatccctgtaccagtgtcaaaaagctgaaggggaatgatgtgcggatcatccttggccagtttgaccagaatatggcagcaaaagtgttctgttgtgcatacgaggagaacatgtatggtagtaaatatcagtggatcattccgggctggtacgagccttcttggtgggagcaggtgcacacggaagccaactcatcccgctgcctccggaagaatctgcttgctgccatggagggctacattggcgtggatttcgagcccctgagctccaagcagatcaagaccatctcaggaaagactccacagcagtatgagagagagtacaacaacaagcggtcaggcgtggggcccagcaagttccacgggtacgcctacgatggcatctgggtcatcgccaagacactgcagagggccatggagacactgcatgccagcagccggcaccagcggatccaggacttcaactacacggaccacacgctgggcaggatcatcctcaatgccatgaacgagaccaacttcttcggggtcacgggtcaagttgtattccggaatggggagagaatggggaccattaaatttactcaatttcaagacagcagggaggtgaaggtgggagagtacaacgctgtggccgacacactggagatcatcaatgacaccatcaggttccaaggatccgaaccaccaaaagacaagaccatcatcctggagcagctgcggaagatctccctacctctctacagcatcctctctgccctcaccatcctcgggatgatcatggccagtgcttttctcttcttcaacatcaagaaccggaatcagaagctcataaagatgtcgagtccatacatgaacaaccttatcatccttggagggatgctctcctatgcttccatatttctctttggccttgatggatcctttgtctctgaaaagacctttgaaacactttgcaccgtcaggacctggattctcaccgtgggctacacgaccgcttttggggccatgtttgcaaagacctggagagtccacgccatcttcaaaaatgtgaaaatgaagaagaagatcatcaaggaccagaaactgcttgtgatcgtggggggcatgctgctgatcgacctgtgtatcctgatctgctggcaggctgtggaccccctgcgaaggacagtggagaagtacagcatggagccggacccagcaggacgggatatctccatccgccctctcctggagcactgtgagaacacccatatgaccatctggcttggcatcgtctatgcctacaagggacttctcatgttgttcggttgtttcttagcttgggagacccgcaacgtcagcatccccgcactcaacgacagcaagtacatcgggatgagtgtctacaacgtggggatcatgtgcatcatcggggccgctgtctccttcctgacccgggaccagcccaatgtgcagttctgcatcgtggctctggtcatcatcttctgcagcaccatcaccctctgcctggtattcgtgccgaagctcatcaccctgagaacaaacccagatgcagcaacgcagaacaggcgattccagttcactcagaatcagaagaaagaagattctaaaacgtccacctcggtcaccagtgtgaaccaagccagcacatcccgcctggagggcctacagtcagaaaaccatcgcctgcgaatgaagatcacagagctggataaagacttggaagaggtcaccatgcagctgcaggacacaccagaaaagaccacctacattaaacagaaccactaccaagagctcaatgacatcctcaacctgggaaacttcactgagagcacagatggaggaaaggccattttaaaaaatcacctcgatcaaaatccccagctacagtggaacacaacagagccctctcgaacatgcaaagatcctatagaagatataaactctccagaacacatccagcgtcggctgtccctccagctccccatcctccaccacgcctacctcccatccatcggaggcgtggacgccagctgtgtcagcccctgcgtcagccccaccgccagcccccgccacagacatgtgccaccctccttccgagtcatggtctcgggcctgtaagggtgggaggcctgggcccggggcctcccccgtgacagaaccacactgggcagaggggtctgctgcagaaacactgtcggctctggctgcggagaagctgggcaccatggctggcctctcaggaccactcggatggcactcaggtggacaggacggggcagggggagacttggcacctgacctcgagccttatttgtgaagtccttatttcttcacaaagaagaggaacggaaatgggacgtcttccttaacatctgcaaacaaggaggcgctgggatatcaaacttgcaaaaaaaaaaaaaaaaaaaaaaaaacaaaaaaactagacaaggagagaggcactagaactccagctggaagtcacggagtggctcgagcagccttgggaagaggcaaggagcttctgaagaaactgcctctgcacacacatcactggctgtgacccctcaggctagcccttctccactctgggggaggaggtgggaagggccaccaggcccccagctgccaggccagctgaccccagccttcctggaacagggagtctgcaggagcgcagacaggcacagccctggagcaggcaggccgagggctgcggcactggagcaggctgacttacatgctccacatgggacctgtgtcacccaatgagatgtttgttactctggtaaatgccacacgttaacacaataacacccattcctgggaccgtggggatttagggcacgtcactgcagacacgctctgcagcattcaccgacagtctgtcatgcacccaccacgttggccatgtccttgtgttcctatcggatgctcccagtaaccagggggaccacccgagctaatcatggaatgtctgttcccagcaaacacgataaagaaagattgtgcactttaacctctctcatcagggcccaagggctggctgggattttttttttttttttcccactaactttgtttctgaccaaagtgaattggaggcactctgctaaaagacatccccgtagacataggggagagagttgctggctgagggcttcccttggcttccagaaggcagccttccatccagacaagccagtgagctctccccttgggatcactggggtgatcagtcagcagattgattctcattcataagatcattcctccctttaaattgagcccctaagagcactggcctgggagtcagacagacctgggttcaagtcctcagtcccctgcccactccctacgtgactttgatcaggtcactagtgtctctctgagcctcagtttcccctctgtaacttggggttgaactaaaacacctgtcctgcctacctcacaaggtcactctgaggattgaaacttgatcttgtccaggaaagctttgtaccaaacagtgaagccgccctgatccgtgaggtatgagtatgactctgaccttcagccctccctacagccgggggtgtggcccagagaagcttccagcacagccctctacccagaacatccgggctggagggaggctcccagtgacttttctgacattcctagacaggttcattctttgctcaagaaaggcctgaatgacaatgtccaggatgtctgcacaactgagcagctcgctcactccctaaagaaacctattggcagcttcaacaggcaggcaataatctcttcccagaaccactgcagtcaggaataaactgttttctccaccaggctttgacaaaagggcccacaggaatcttaccaatgccaacatttcaaagcaccctatttcacgtagcatagctttctgctccccttccccaaagagaggttatggaggtactgtagcttttagggaaaaaaaaatgttaacacatcacaggtcaagttgaagtcattctctgtttaggcactaaaaatcggtgttgtcactcactgtgtattaccagtatttacttgctttcttgatttcaccaaaaccaaatttaatttaaaggaccacattaatttttcaaagggaaagagacaattaattgtacataatgtatacacacacacaaaaaaaaatacctgtagaaatattattccagcatagcaggaaaacaaacaaaagtattggactgtcggaggtgagcctgtgcgtctgtaaccctttgtgactcctgagcgtgcgctgtcttctaggttaactcacgaagtacattctctgtcttactgatactgtaggttcacccatttttttttaatttcctcgcaaataacaagacccacagaagtgactctagctacttaatggttctgttcttttatatgcagcaaacacaccgtccatttctgaagaggcttcggcctgaaggcattttccaatgatgttagtgcacaaaacgctttaaattagactggaactgccagaatcaaatgtaaatgaggaatttctcgtacccctactgcatggtatcgatttttaataaattgttgcaaatttgtttttatgaataaaaggaaaaaacctgtcgtctttaaaaaaaaaaaaaaaa

SEQ ID NO: 158 - DNA, 2871 bp, Artificial Sequence
  MPZL2
aacagtctgggacatttcagactggcaccacctcctctggctgtttccgaggccatctagaggccagagcccagtcagattaactgaaagtaaagagaggactgcgggagtttgggacctttgtgcagacgtgctcatgctcgttcgtgtagagggcgggagagaggaaaggaaggagggcattgggagctgaggccccacctttcatttcagaaaagtgcacaggcagagcgggctgagtcacaggcacaggtgaggaactcaactcaaactcctctctctgggaaaacgcggtgcttgctcctcccggagtggccttggcagggtgttggagccctcggtctgccccgtccggtctctggggccaaggctgggtttccctcatgtatggcaagagctctactcgtgcggtgcttcttctccttggcatacagctcacagctctttggcctatagcagctgtggaaatttatacctcccgggtgctggaggctgttaatgggacagatgctcggttaaaatgcactttctccagctttgcccctgtgggtgatgctctaacagtgacctggaattttcgtcctctagacgggggacctgagcagtttgtattctactaccacatagatcccttccaacccatgagtgggcggtttaaggaccgggtgtcttgggatgggaatcctgagcggtacgatgcctccatccttctctggaaactgcagttcgacgacaatgggacatacacctgccaggtgaagaacccacctgatgttgatggggtgataggggagatccggctcagcgtcgtgcacactgtacgcttctctgagatccacttcctggctctggccattggctctgcctgtgcactgatgatcataatagtaattgtagtggtcctcttccagcattaccggaaaaagcgatgggccgaaagagctcataaagtggtggagataaaatcaaaagaagaggaaaggctcaaccaagagaaaaaggtctctgtttatttagaagacacagactaacaattttagatggaagctgagatgatttccaagaacaagaaccctagtatttcttgaagttaatggaaacttttctttggcttttccagttgtgacccgttttccaaccagttctgcagcatattagattctagacaagcaacacccctctggagccagcacagtgctcctccatatcaccagtcatacacagcctcattattaaggtcttatttaatttcagagtgtaaattttttcaagtgctcattaggttttataaacaagaagctacatttttgcccttaagacactacttacagtgttatgacttgtatacacatatattggtatcaaaagggataaaagccaatttgtctgttacatttcctttcacgtatttcttttagcagcacttctgctactaaagttaatgtgtttactctctttccttcccacattctcaattaaaaggtgagctaagcctcctcggtgtttctgattaacagtaaatcctaaattcaaactgttaaatgacatttttatttttatgtctctccttaactatgagacacatcttgttttactgaatttctttcaatattccaggtgatagatttttgttgttttgttaattaatccaagatttacaatagcacaacgctaaatcacacagtaactacaaaaggttacatagatatgaaaagattggcagaggccattgcaggatgaatcacttgtcacttttcttctgtgctgggaaaaataatcaacaatgtgggtctttcatgagcagtgacggatagtttagcttactatgtttcccccccaattcaatgatctataacaacagagcaaagtctatgctcatttgcagactggaatcattaagtaatttaataaaaaaattgtgaaacagcatattacaagtttgaaaattcagggctggtgaaaaaaatcaactctaaatgatgataattttgtacagttttatataaaactctgagaactagaagaaattattaactttttttcttttttaattctaattcacttgtttattttgggggaggaagactttggtatggagcaaagaaataccaaaactactttaaatggaataaaaccaactttattctttttttcccccatactggtagataaagcaaactttataagtgggctattgaaagaaaagttacaagcttaagatacagaagcatttgttcaaaggatagaaagcatctaaaagtttaggctcaagatcaatctttacagattgatattttcagtttttaatcgactggactgcagatgttttttcttttaacaaactggaattttcaaacagattatctgtatttaaatgtatagaccttgatatttttccaatactattttttaaaaaattgtatgatttacatatgaacctcagttctgaaattcattacatatctgtctcattctgccttttatactgtctaaaaaagcaaagttttaaagtgcaattttaaaactgtaaattacatctgaaggctatatatcctttaatcacattttatattttttcttcacaattctaacctttgaaaatattataactggatatttcttcaaacagatgtcctggatgatggtccataagaataatgaagaagtagttaaaaatgtatggacagtttttccggcaaaatttgtagcttatgtcttggctaaatagtcaaggggtaatatgggcctgttgtttagtgtctccttcctaaagagcacttttgtattgtaatttattttttattatgctttaaacactatgtaaataaacctttagtaataaagaattatcagttatataaaaaaaaaaaa

SEQ ID NO: 159 - DNA, 3163 bp, Artificial Sequence
  AVIL
gatgtttcagtcctggaaagacaagcatcatgcctctgaccagtgccttcagggctgtggacaacgaccctgggatcattgtctggagaatagagaaaatggagctggcgctggtgcctgtgagcgcccacggcaacttctatgagggggactgctacgtcatcctctcgacccggagagtggccagtctcctatcccaggacatccacttctggatcgggaaggactcctcccaggatgagcaaagctgcgcagccatatataccacacagctggacgactacctgggaggcagccctgtgcagcaccgagaggtccagtaccatgagtcagacactttccgtggctacttcaagcagggcatcatctacaagcaggggggtgtcgcctctgggatgaagcacgtggagaccaatacctacgacgtgaagcggctgctacatgtgaaagggaaaagaaacatcagggctaccgaggtggaaatgagctgggacagtttcaaccgaggtgatgtcttcttgctggaccttgggaaagtcatcatccaatggaatggcccagagagcaacagtggggagcgcctgaaggctatgcttctggcaaaggatattcgagacagggagcgagggggccgtgctaaaataggagtgatcgagggagacaaggaggcagccagcccagagctgatgaaggtccttcaggacacccttggccgacgctccattatcaagcctacagtccctgatgagatcatagatcagaagcagaaatcaactatcatgttgtatcatatctcagattcagctgggcagctggcagtcacagaggtagcaacaaggcctctggtccaggacttactgaaccatgatgactgctacatcctggaccaaagtggaaccaaaatctacgtgtggaaaggaaaaggagccacaaaggctgaaaaacaggcagccatgtctaaagcgctgggcttcatcaagatgaagagctaccccagcagcaccaatgtggagaccgtcaacgatggtgctgagtcggccatgttcaagcagctgttccagaagtggtcagtaaaggaccagaccatgggcctggggaaaacgttcagcattggtaaaattgctaaagttttccaggataaatttgatgtgactctgctacacaccaagccagaggtagctgcccaggaaagaatggtcgatgatggcaacggaaaagttgaggtctggagaattgagaacctggagctggtccctgtggagtatcaatggtatggcttcttttatgggggagactgttatctggtcctctacacatacgaggtaaatgggaagccacatcacatcttgtacatctggcagggccgccacgcctcacaggatgagctggcagcctcagcataccaggcagtggaggtggatcggcagtttgatggggctgctgtgcaggttcgagtcaggatgggaacggagccacgccacttcatggccatcttcaaagggaagctagttatctttgagggtgggacttccaggaagggaaatgccgagcctgaccctccagtaagactcttccaaattcatggaaatgacaaatctaacaccaaagcagtggaagttccagcctttgcctcctccctaaactccaatgatgtctttctgctgcgaactcaggcagagcactacctgtggtatggcaaggggtctagtggggatgagcgggcaatggctaaggagctggccagccttctctgtgatggcagcgagaacactgtggccgagggccaggagccagccgagttctgggacctactgggagggaaaactccctatgccaatgataaaagacttcagcaggaaatcctagatgtccagtctcgtctctttgaatgttccaataagaccggccaattcgttgtcactgagatcacagacttcacccaggatgacctgaaccctactgacgtgatgctcctagatacctgggaccaggtgttcttgtggattggggctgaggccaatgccacggagaaggagagtgcccttgccacagcacagcagtacctgcacactcaccccagcggccgagatcccgacacaccaatcctgatcattaagcaggggtttgagcctcccatcttcacaggctggttcctagcctgggaccctaacatttggagtgcaggaaaaacatatgaacaattaaaagaagagctgggagatgctgctgctatcatgcgaatcactgctgacatgaagaatgcaaccctctccctgaattctaatgacagtgagccaaaatattaccctatagcagttctgttgaaaaaccagaatcaggagctgcctgaggatgtaaaccctgccaaaaaggagaattacctctctgaacaggactttgtgtctgtgtttggcatcacaagagggcaatttgcagctctgcctggctggaaacagctccaaatgaagaaagaaaaggggcttttctaaagcaagaaggcctatacctattgcaaggccacagaaaagagcagatagtgccaatatcaggaaataatttatccaccaatttctgcctgacattcagctacttaatttagatataatagagtctgcaaatcacggcatgttctccattttttctcatccttgcattccttgcttgttatatacctaaaatgttaaccatatagtttttgggttttgtggccctctagctaaagcctcagcagaaagcactaaaactgcataaatctggagaaatcaaaagaaagagaaccaaaaaacaatgcttaaaatgtttaataactttatgtttaatattataccaggacctacctttgttttcaattttaagatgattatttctaaaatctatttagcctgtaaatcattgaaatcatatatgcactccataggcaaaatccaaatacccagatctgtaatgtgtcaaagcatttttcacttttcaaataaagatacctataatgaacaaaaaaaaaaaaaaaaaaaaaaaaaaaaaaaaaaaaaaaaaaaaaaaaaaaaaaaaaaaaaaaaaaaaaaaaaaaaaaaaaaaaaaaaaaaaaaaaaaaaaaaaaaaaaaaaaaaaaaaaaaaaaaaaaaaaaaaaaaaaaaaaaaaaaaaaaaaaaaaaaaaaaaaaaaa

SEQ ID NO: 160 - DNA, 2047 bp, Artificial Sequence
  PCOLCE2
gaacaaacgggatattcagcagtggcctgtggctgccagagcagctcctcaggggaaactaagcgtcgagtcagacggcaccataatcgcctttaaaagtgcctccgccctgccggccgcgtatcccccggctacctgggccgccccgcggcggtgcgcgcgtgagagggagcgcgcgggcagccgagcgccggtgtgagccagcgctgctgccagtgtgagcggcggtgtgagcgcggtgggtgcggaggggcgtgtgtgccggcgcgcgcgccgtggggtgcaaaccccgagcgtctacgctgccatgaggggcgcgaacgcctgggcgccactctgcctgctgctggctgccgccacccagctctcgcggcagcagtccccagagagacctgttttcacatgtggtggcattcttactggagagtctggatttattggcagtgaaggttttcctggagtgtaccctccaaatagcaaatgtacttggaaaatcacagttcccgaaggaaaagtagtcgttctcaatttccgattcatagacctcgagagtgacaacctgtgccgctatgactttgtggatgtgtacaatggccatgccaatggccagcgcattggccgcttctgtggcactttccggcctggagcccttgtgtccagtggcaacaagatgatggtgcagatgatttctgatgccaacacagctggcaatggcttcatggccatgttctccgctgctgaaccaaacgaaagaggggatcagtattgtggaggactccttgacagaccttccggctcttttaaaacccccaactggccagaccgggattaccctgcaggagtcacttgtgtgtggcacattgtagccccaaagaatcagcttatagaattaaagtttgagaagtttgatgtggagcgagataactactgccgatatgattatgtggctgtgtttaatggcggggaagtcaacgatgctagaagaattggaaagtattgtggtgatagtccacctgcgccaattgtgtctgagagaaatgaacttcttattcagtttttatcagacttaagtttaactgcagatgggtttattggtcactacatattcaggccaaaaaaactgcctacaactacagaacagcctgtcaccaccacattccctgtaaccacgggtttaaaacccaccgtggccttgtgtcaacaaaagtgtagacggacggggactctggagggcaattattgttcaagtgactttgtattagccggcactgttatcacaaccatcactcgcgatgggagtttgcacgccacagtctcgatcatcaacatctacaaagagggaaatttggcgattcagcaggcgggcaagaacatgagtgccaggctgactgtcgtctgcaagcagtgccctctcctcagaagaggtctaaattacattattatgggccaagtaggtgaagatgggcgaggcaaaatcatgccaaacagctttatcatgatgttcaagaccaagaatcagaagctcctggatgccttaaaaaataagcaatgttaacagtgaactgtgtccatttaagctgtattctgccattgcctttgaaagatctatgttctctcagtagaaaaaaaaatacttataaaattacatattctgaaagaggattccgaaagatgggactggttgactcttcacatgatggaggtatgaggcctccgagatagctgagggaagttctttgcctgctgtcagaggagcagctatctgattggaaacctgccgacttagtgcggtgataggaagctaaaagtgtcaagcgttgacagcttggaagcgtttatttatacatctctgtaaaaggatattttagaattgagttgtgtgaagatgtcaaaaaaagattttagaagtgcaatatttatagtgttatttgtttcaccttcaagcctttgccctgaggtgttacaatcttgtcttgcgttttctaaatcaatgcttaataaaatatttttaaaggattacagaacaaccaaaaaaaaaaaaaaaaaa

SEQ ID NO: 161 - DNA, 2240 bp, Artificial Sequence
  WIF1
gccccactcctcgctcgcacctcgctcgcgccagcccttcccgctcttctgttctcgctctatttgccccgctgactgctggcctcgccagctttgccagtcttacgtctctgccgcccccactcccgcccgcgccccatcttcttgcgcgactcgcgcccgctggtccccccctcctcctcccgcgtcctgcctgccccctcctcctgctctcgcaggctccttggcacccaggccgggaggcgacgcgcccagccgtctaaacgggaacagccctggctgagggagctgcagcgcagcagagtatctgacggcgccaggttgcgtaggtgcggcacgaggagttttcccggcagcgaggaggtcctgagcagcatggcccggaggagcgccttccctgccgccgcgctctggctctggagcatcctcctgtgcctgctggcactgcgggcggaggccgggccgccgcaggaggagagcctgtacctatggatcgatgctcaccaggcaagagtactcataggatttgaagaagatatcctgattgtttcagaggggaaaatggcaccttttacacatgatttcagaaaagcacaacagagaatgccagctattcctgtcaatatccattccatgaattttacctggcaagctgcagggcaggcagaatacttctatgaattcctgtccttgcgctccctggataaaggcatcatggcagatccaaccgtcaatgtccctctgctgggaacagtgcctcacaaggcatcagttgttcaagttggtttcccatgtcttggaaaacaggatggggtggcagcatttgaagtggatgtgattgttatgaattctgaaggcaacaccattctccaaacacctcaaaatgctatcttctttaaaacatgtcaacaagctgagtgcccaggcgggtgccgaaatggaggcttttgtaatgaaagacgcatctgcgagtgtcctgatgggttccacggacctcactgtgagaaagccctttgtaccccacgatgtatgaatggtggactttgtgtgactcctggtttctgcatctgcccacctggattctatggagtgaactgtgacaaagcaaactgctcaaccacctgctttaatggagggacctgtttctaccctggaaaatgtatttgccctccaggactagagggagagcagtgtgaaatcagcaaatgcccacaaccctgtcgaaatggaggtaaatgcattggtaaaagcaaatgtaagtgttccaaaggttaccagggagacctctgttcaaagcctgtctgcgagcctggctgtggtgcacatggaacctgccatgaacccaacaaatgccaatgtcaagaaggttggcatggaagacactgcaataaaaggtacgaagccagcctcatacatgccctgaggccagcaggcgcccagctcaggcagcacacgccttcacttaaaaaggccgaggagcggcgggatccacctgaatccaattacatctggtgaactccgacatctgaaacgttttaagttacaccaagttcatagcctttgttaacctttcatgtgttgaatgttcaaataatgttcattacacttaagaatactggcctgaattttattagcttcattataaatcactgagctgatatttactcttccttttaagttttctaagtacgtctgtagcatgatggtatagattttcttgtttcagtgctttgggacagattttatattatgtcaattgatcaggttaaaattttcagtgtgtagttggcagatattttcaaaattacaatgcatttatggtgtctgggggcaggggaacatcagaaaggttaaattgggcaaaaatgcgtaagtcacaagaatttggatggtgcagttaatgttgaagttacagcatttcagattttattgtcagatatttagatgtttgttacatttttaaaaattgctcttaatttttaaactctcaatacaatatattttgaccttaccattattccagagattcagtattaaaaaaaaaaaaattacactgtggtagtggcatttaaacaatataatatattctaaacacaatgaaatagggaatataatgtatgaactttttgcattggcttgaagcaatataatatattgtaaacaaaacacagctcttacctaataaacattttatactgtttgtatgtataaaataaaggtgctgctttagttttctgagc

SEQ ID NO: 162 - DNA, 790 bp, Artificial Sequence
  VAMP8
ggaaacctgagttaggtgtggctggagcgactcgagatgcgaggtgggcgggggcaggctgaaagttggagcaagcaggaagtgaactgagggccaccctgggaggaagccgactaggcgaattcacttactgaccggcctgggctgctctgagacatggaggaagccagtgaaggtggaggaaatgatcgtgtgcggaacctgcaaagtgaggtggagggagttaagaatattatgacccagaatgtggagcggatcctggcccggggggaaaacttggaacatctccgcaacaagacagaggatctggaagccacatctgagcacttcaagacgacatcgcagaaggtggctcgaaaattctggtggaagaacgtgaagatgattgtccttatctgcgtgattgtttttatcatcatcctcttcattgtgctctttgccactggtgccttctcttaagtaacagggaacctctcccacctgcccttctcttcagggacaaccctccataaatgtgtgccaagagggtctcctttcctgtcttcctctacagagaatgctgctcggtcctcctacccctcttcccgaggccctgctgccatgttgtatgccccagaaggtaccttggtcccccggaaggagagaaaaaagagagatggactgtggctgcatttcttgggtccttagagtgggctggagagacctagagggcccagcatgtggctgggaaactgttggtggccagtgggtaataaagacctttcagtatccctataaaaaaaaaaaaaaa

SEQ ID NO: 163 - DNA, 5453 bp, Artificial Sequence
  (ZNF770
gctcagcccgttgccgcgccggccctgcggacgtgcgcgcgctgccttcgcggcacctgggcctgaggtgcgtgcctcccgggccctcgccagctccagatgcgtgaggaggacttcagaaacccgactgagaagtggagcgacccccagggagggtcggacctgcctcaataccgccaaggtctttcatttcttgttcgcttactttcgtgaaatcctcacatcgttttaatggtactagtcaagacaagaaaatcaacaggctttcagccttgaggcaacattggatattattgagacatctgtggaatttaagaacagtatggagctcatcagagtatatcattgaagaatatgatggctgaaaacaatttaaaaatgctaaagattcaacagtgtgtggtagccaacaaactacctagaaacaggccatatgtttgcaatatttgttttaagcactttgaaacaccatcaaaattagctaggcactatctcattcatactggtcaaaagccatttgaatgtgatgtgtgtcataaaacctttagacaactagttcatctggagaggcatcaactaactcatagtctgccttttaaatgtagtatttgtcagcgtcactttaaaaatctgaagacatttgtgaagcaccaacaacttcacaatgaaacctatcagaataatgttaaacaggtcagaagattgctggaggccaagcaagaaaagtcaatgtatggagtgtataatacttttaccacagaggaaagatgggcattacacccgtgctctaagtctgatcccatgtatagcatgaaaagaagaaagaatattcatgcatgtacaatctgtggcaagatgtttccatcacagtcaaaacttgataggcatgtacttattcatactggtcagaggccttttaaatgtgtcttgtgtactaaatcttttcgacagtcaactcacttaaaaatccaccaacttacacattcagaagaaagaccttttcaatgttgtttttgtcaaaaaggatttaagattcaaagcaaacttctgaagcataaacaaatccatactaggaataaggcttttcgggctcttttattaaagaagaggcgtacagaatctcgccccctgcctaataagttaaatgcaaatcagggtggttttgaaaatggtgagattggtgaatctgaggagaataatccacttgatgtccactcaatttatattgtcccttttcaatgtccaaagtgtgaaaagtgttttgaatcagagcagattctcaatgaacacagctgttttgctgctagaagtggcaaaattccaagcaggttcaaaagaagctacaactataaaaccattgttaaaaaaatcttggccaagcttaagcgtgctaggagtaaaaaattagataactttcaatctgagaaaaaagtatttaaaaagagtttcttgagaaattgtgatcttatttctggtgagcagagctctgaacaaacccagagaacatttgtgggttctcttggcaaacatggaacatataaaacaattggcaatagaaagaagaaaacattgactttgccattttcttggcaaaatatgggaaaaaatttgaaaggcatccttacgacagaaaacatattaagcattgataattcagtgaataagaaagacttgtcaatctgtggttcatcaggtgaggaattctttaataactgtgaggtacttcagtgtggtttttcagttccaagggaaaacatacgtactagacataagatatgtccttgtgacaaatgtgagaaggtatttccttctatatccaaactaaaaagacactatttaattcatactggacagaggccctttggctgtaatatttgtgggaaatcttttagacagtcagctcacttaaaaagacatgaacagactcataatgaaaagagtccttatgcatctctttgccaagtagaatttggaaacttcaacaatctttctaatcattcaggtaataatgttaactataatgcttcccaacaatgtcaggctcctggtgttcaaaaatacgaggtctcagagtcagatcaaatgtcaggagttaaggcagagtcacaggattttattcctggtagcaccgggcaaccctgtcttcctaatgtacttttggaatcagagcaaagcaatcctttttgcagttattcagagcatcaggagaaaaatgatgtcttcctgtaccgatgcagtgtttgtgctaaaagtttccgatctccatctaaactggaaagacactacctaattcatgcagggcagaaaccatttgaatgctcagtttgtggcaaaacattcagacaggctcctcactggaagagacatcagcttactcactttaaagaacgaccacaagggaaagtggttgccttagattcggttatgtaaattgtcgcaaccactaacaattgtggtctctggtgatcttatttttaaagcctgtattatttaaaatgcatttttattgaaaggcctgcattaaactgaatggtttcacaggcatttgcttgtcctgcatagtaaggaggtagaatacatagaaaattaatacaatgttttagaaacagccaagttaattttagaggcaagaacatgatttgatgctataaagtaggcattttaatattgtaaacatatactttggctgtattgaaaaatataaatccatgatggctgtacaaataatttagcctcattcattttttaaaggaattattccttaagacatgccatctctttttagatatactcaaaagactgagaggcaaaacttggcttttagctgcagcacatagccctgttatatttgatttattttacatttcatatgaaagcataattttgtccacatgtgactcaaattgcattggtaattttttttttttttttgtaagttaaaaaaactacagagacactaaaggtgaaaatggatgagacaattatagtattattttcattggtctttttttttgagatggagtctcactctttcgccaggctagagtgcagtggcgccatctaggctcactgcaacctccgcatcccagattccagcgattctcctgcctcagcctcctgagtagctgggattacaggtgcctgccatcacgcctggctaatttttgtatttttagtagagacgggggttcaccaagttggccaggatggtctcgatctcttgaccttgtgactcacccgcatcggcctcccaaagtgctgggattacaggcatgagccaccgcacccgacggtcttttcaaagctatttatttttaggactatgtggtaatttcaccttcaggtgataaggattttttttttctcccagctagtgctatctttctcaaaataatttaaaagtaggcgagaggctaggatgtacctatatttaccatgtttacttaccaggaatattttctaagtgccatagtctttttcataatacgtatgagttttaccttttcagaggaataatttcaagtcatttatttgctcattaatgatagcagtagtcatagacttaagactattctagagatcttcatctccataagacttttacatttattttagtaaacttttctttctatgcctctttaatggagtggttctgttatttaagcctgttctaagtttgatcaaatggcaatgactaggtctagttttagtttttatttttgcaggagtctattgctaaagaattttattttgatgcttgttaaatttttattttaattaataaggtagtcattcctgtagagggataagatgcttgtagagttgtgggtatcattccaaatagaactgttatgatttgggaaatattctttactacaaaggacttatttcataattacaaattttccttcatatttgcctttgtttataaaatcttcaggaatgacattctctagcaataaaaggaatgaaccgttatgtttctaagctgaaaagaggaacaggtgggtaattatcctgccatacttaaatatagtggaaaatcctctattgagaatgtggataaatgaacaattgtaagttttgcatcataaactgagaactttcttttgacaggggggaggcgggagggatagtaggtgggggtgatctgcttgcttcttttaccacaggtgatttttaagtaacttgggtttaatttacagagatgaaacatgacagtctgagtaaaatacccagtgatgtagaagtgtgcctgtttattatgtagatacagacatccagcaaaaacaggagaatcacatgctttaaagaacactttctcttaggtttccttgagatatgttcctccagtgcaagcaagataatggtttacagaatttgctttacacaaaacttgtcaagaactcatctgttaaaagcaaggaataactagtttatattttccaataatgttcaaggttttctccttaatatgtttgaaattattgattttggcatttttctaagcaatttatgtaattttatttgaagaaaatgttttgtataatgtttttcccagcctaaacagggagagtcctaacagtgttgtgcttgtatgattctgagactttatttgcgtaagtgatactactatactttatttttgacccatgcctttttaagctgtttcatattgaaaggtggaatattgtaaaaattttgtcaaagatgtactgtagtgctatttgaagtacctgtaacaaaacagttggccctctgtatccatgtactctgcatctgtggattaaaccaattgcagatcaaaaatattagaaaaaataaaaataatacaaataaaaatacagtataacagttatttaaatagcatttacattgcattaggtattagtctagggataaagtatacaggcggatgtgcgttggttatatacaaatatgtcattttatgtaagggacttgagtatacttggatttttggtatctgtgggttggggggacggtccaggaaccaataccccatggataccaagggacaactgtacttatttacctttattgtcattgcaagcttcttatggaaactttataggaatgaaaatatacatgttaagaagattaaacattagatagtagatggtttgttgcatgctagaactgttagtattgttgaatcaattactttggtttcatgaaaaaataaacgataaatatctttaaagagaactagaagaattttttgtttgagtgattccaggctgtagtatgatcatttactgaagtagtttgattggctggctaacttagaattattgtttcttgttttgtactgcaataggggttataattgtaagataaaaatgtgtgtgtgtttaagggaagtaggtggtggttaaaattcttggaaaattttcagaatactttaaaaataaagttccaagttacacaaaaaa

SEQ ID NO: 164 - DNA, 3724 bp, Artificial Sequence
  COMMD2
cggaagtggcgaaggcggggtcggcgctgccgggtgaaatcgtaggacagtgaagatgctgctggaattgtccgaggagcataaggaacacctggccttcctgcctcaagtggacagcgcggtggtcgccgagtttgggcggattgctgtggaattcctgagacgcggcgcaaacccaaaaatctacgaaggcgccgccagaaaactcaatgtgagtagtgacactgtccagcatggtgtggaaggattaacgtatctcctcactgagagctcaaagctcatgatttctgaactggatttccaagactctgtttttgttctgggattctctgaagaattaaacaaattgttgcttcagctttatctggacaacagaaaagagatcagaacgattctgagtgaattggcaccaagccttcccagttatcataaccttgaatggcgactagatgtacagcttgcaagtagaagtctcaggcaacagattaaaccagcagtgactataaagctacaccttaatcaaaatggagatcacaacaccaaagttctgcagacagacccagccaccctgctccatttggttcaacaactggaacaagcattggaagagatgaagacaaatcactgtaggagagttgttcgcaacatcaagtagtaccagttttaaggttttaattcatttgaatcacttatgaattgatgatatacagcaattacttttcaaaattaattttttattaattcatgatgataaatacatagtattcctcagtatctattccaagatactgaggtcataatcagaagctaagctgggtgcagtggctcatgccagttatcccagcactttgggaggccgaggtgggcaaatcatgaggtcaggagattgagaccttcctggctaacatggtgaaaccccatctctactaaaaatataaaaaattagccaggtgtggtggcacgcatctatcagagtcccagctactcaggaggctgaggcaggagaatcgcttgaacctgggaggtggaggttgcagtgagctgagattgtgccactgcactccagcctgggtgacagagtgagactccatctcaaaaataataataataataataaagtaaaaataaaaataaaaaagtaatcagaagctaaagtaaagttcctttcctggtgctaactgtggtcttcttgacacattaagatgtattttgtattttaagagtctcatgctctaccgttggaactagccagatggccattattttgtattttaaatacataaataggattgaatcaactagaaatgaatctatatgttctgtatatatgaatgactatcttgtttttgctacttcttttgactgcttaattttattattttcatctttattgatcaaatttgaaaataaaattcacaatgtaatactactactatgcagaattttctaaacagttcagtatttttgacttttaaaaacaccccacagtgttaatagccacagaatattgaacatcaataggatttttaatgctatattgttataggcagtttattcatttttctttgtatatgaagatgataagtatcatattgcctaagtttgagtgatcatggttaattaattggcttaaatagtactcaaatttgtgtggtcgtatattgtattttatcaaggactaattcttccaccatacccaaagcatctaggagacactctgtcatttacatttacaaataatggatgcagagaaatataatcaattcttgattgtcctggatacaaattatagtcactttttataatttgaataaactatgatgagggaaggaaggccatgtttattacattataggcaactatcccttctcaaaacataacttgatttatgttttgttttattttttagtagggaaccaaaagcttttggtctgaaaaactcaggtgctgatttgtcaggtcagcctgagagagtgcagagatactgaggtcagcttagggagaagaattgtatggaagggtggaaatgagggttcagtcttaactatgtgtccaagaccttatcctgagagtcttcatggaataatctagaaagggctgtagaagcaatcaaactctaaactgcgctctagactttgtcaatactttgcttcgtaagaattagggattttcatatcagagtgataccatgttgcaatctctttagagaagagagagcctagcagggaataggctagtggaagaaaaacatacttgagatggttacccattggtccctgcaggcatctgggccacccttttcctgtaggtatatattctgccgttgtgaaacaactatattattagatgtcagcaaactataatcagaaataatttttaattatagtggcaacttgattaatgaagctctcatatacaacctcacaaacaaaaagaaactttattacgtgaaatagtagcatatgtcattgggtttaaaagcaacatgcctgcaaaacatatgataaaaaatacctctgtaagggtttttatttgtccaccttcgatggaaggtaaacatggctgatcccagccaagatgaaacaatagccctttgtctcctcagaacaacctatctccaactctttgtccactgttcttaccccaattaaaacaagaaagcatgtgctaatccttttttaatttttatcaacctgccttggcctcctttcactgtactccattattccttctgtgatgttctaccttcttcaccttttgagaccagggtgagttgggagcagtttgcctaccttcttttagaatctggggcttatcttttagtacaagccattgaataagcctcttccttttttttgctcaaacattccacatccttgtggattcccctgcattgtttgttttatataacatttgatatttgttgtagcttgtatatgaacataattttctttagaggtagtcactgttctctccagtatgacccaggtttcttgactctgagtaatgcaccttctataactatctaaatttctattgaagctttttggattatgagtatgctgacttttcacgattggctggtgcatgtttagacttaaatgtcatatccttcatgtctcaaagccaaaatagtaacatctcatctcagaacagagctgtgaccacatgccaatatatgtgtcacaaagtctacatatgttacattccttggaagtctccttaaatgtttcacaaaatgtcaacaagcttgttttgttattgatatttccgagattgggcacatttaagacagtaaacgggaaaggtggtgaagatgctataagaagatgctgtatcttgagaattgaaaaatgagaatctgacatggtttgaaaaatcatgaagggtatatataaaggatgcatgtgtaggagccattaaaattcataacagtatgtgccccttcagcgttttaatcttatgaagtggttaagagataagtcttcggagttggacaaaaggatttgaatttaggttctgtggattattatgggtccttgataaattctcaaagcctttttttttgttcatctctaaaataggaatataggattacctaccacattgactcgtaaggactatatgagaccatgtatatagaatgtttaacatagtaccaggctttacaaagaactcaataaatgtttaccattattgaaatagtaaaaaaaaaaaaaaaaaa

SEQ ID NO: 165 - DNA, 2586 bp, Artificial Sequence
  SCG2
ataaagtgattattttctcttggttctttgaaaaacctcgcttgtgctggggtttgtggctgaacccggtgacgtcagtgtggcagtgcggagtcaggcgcagcggctccctataagcagaggagctgtccgtgtgctgaaacggcccgagaagctcgcccggagaacggggaggaatatgctgtggagctcctctgccatataaacaaaaagaggaaatctttcaaacatggctgaagcaaagacccactggcttggagcagccctgtctcttatccctttaattttcctcatctctggggctgaagcagcttcatttcagagaaaccagctgcttcagaaagaaccagacctcaggttggaaaatgtccaaaagtttcccagtcctgaaatgatcagggctttggagtacatagaaaacctccgacaacaagctcataaggaagaaagcagcccagattataatccctaccaaggtgtctctgtcccccttcagcaaaaagaaaatggcgatgaaagccacttgcccgagagggattcactgagtgaagaagactggatgagaataatactcgaagctttgagacaggctgaaaatgagcctcagtctgcaccaaaagaaaataagccctatgccttgaattcagaaaagaactttccaatggacatgagtgatgattatgagacacagcagtggccagaaagaaagcttaagcacatgcaattccctcctatgtatgaagagaattccagggataacccctttaaacgcacaaatgaaatagtggaggaacaatatactcctcaaagccttgctacattggaatctgtcttccaagagctggggaaactgacaggaccaaacaaccagaaacgtgagaggatggatgaggagcaaaaactttatacggatgatgaagatgatatctacaaggctaataacattgcctatgaagatgtggtcgggggagaagactggaacccagtagaggagaaaatagagagtcaaacccaggaagaggtgagagacagcaaagagaatatagaaaaaaatgaacaaatcaacgatgagatgaaacgctcagggcagcttggcatccaggaagaagatcttcggaaagagagtaaagaccaactctcagatgatgtctccaaagtaattgcctatttgaaaaggttagtaaatgctgcaggaagtgggaggttacagaatgggcaaaatggggaaagggccaccaggctttttgagaaacctcttgattctcagtctatttatcagctgattgaaatctcaaggaatttacagatacccccagaagacttaattgagatgctcaaaactggggagaagccgaatggatcagtggaaccggagcgggagcttgaccttcctgttgacctagatgacatctcagaggctgacttagaccatccagacctgttccaaaataggatgctctccaagagtggctaccctaaaacacctggtcgtgctgggactgaggccctaccagacgggctcagtgttgaggatattttaaatcttttagggatggagagtgcagcaaatcagaaaacgtcgtattttcccaatccatataaccaggagaaagttctgccaaggctcccttatggtgctggaagatctagatcgaaccagcttcccaaagctgcctggattccacatgttgaaaacagacagatggcatatgaaaacctgaacgacaaggatcaagaattaggtgagtacttggccaggatgctagttaaataccctgagatcattaattcaaaccaagtgaagcgagttcctggtcaaggctcatctgaagatgacctgcaggaagaggaacaaattgagcaggccatcaaagagcatttgaatcaaggcagctctcaggagactgacaagctggccccggtgagcaaaaggttccctgtggggcccccgaagaatgatgataccccaaataggcagtactgggatgaagatctgttaatgaaagtgctggaatacctcaaccaagaaaaggcagaaaagggaagggagcatattgctaagagagcaatggaaaatatgtaagctgctttcattaattaccctactttcattcctcccaccccaagcaaatcccaacatttctcttcagtgtgttgacttctatcctgttaacactgtaatatctttaaatgatgtacaggcagatgaaaccaggtcactggggagtctgcttcatttcctctgagctgttatcttgtgtatggatatgtgtaaatgttatgactccttgataaaaaatttattatgtccattattcaagaaagatatctatgactgtgtttaatagtatatctaatggctgtggcattgttgatgctcacatatgataaaaaagtgtcctataattctattgaaagtttttaatatttattgaattattttgttactgtctgtagtgttttgtggagtactggaccaaaaaaataaagcattataaatatatagttttatttataaggccttttctattgtgtgttttactgttgattaataaatgttatttctggacaaaaaaaaaaaaaaaa

SEQ ID NO: 166 - DNA, 1781 bp, Artificial Sequence
  FEZ1
cggggaaggggtggggtggaggcgggagcggagccgggcgccgccggagctgcgcggggagcgctcgctggctggctggctggctggctctccgctgcgctgcgctgcgctccggccgctcccgcggcccgtggatgggggtgtccggctgagccccgggatccgcctccctccgccaggacccgcacagataaactcatcctgaaagtcgctgttgttctcctgctgagcaagaatggaggccccactggtgagtctggatgaagagtttgaggaccttcgaccctcctgctcggaggacccggaggagaagccccagtgtttctatggttcatctccccaccatctcgaggacccctccctctccgagcttgagaatttttcttccgaaataatcagcttcaagtccatggaggacctcgtaaatgaatttgatgagaagctcaatgtctgctttcggaactacaacgccaagaccgagaacctagctcccgtgaagaaccagttacagatccaagaggaggaggagacccttcaggacgaggaggtttgggatgctctgacagacaattacatcccttcactctcagaagactggagggatccaaacatcgaggctctgaatggcaactgctctgacactgagatccatgagaaagaagaggaagagttcaatgagaagagtgaaaatgattccggtatcaacgaggagcctctgctcacagcagatcaggtaattgaggagattgaggaaatgatgcagaactccccagaccctgaggaagaagaggaggttctggaagaagaggatggaggagaaacttcctcccaggcagactcggtcctcctgcaggagatgcaggcattgacacagaccttcaacaacaactggtcctatgaagggctgaggcacatgtctgggtctgagctgaccgagctgctggaccaggtggagggtgccatccgtgacttctcggaggagctggtgcagcagctggcccgccgggacgagctggagtttgagaaggaagtgaagaactcctttatcacggtgcttattgaggttcagaacaagcagaaggagcagcgagaactgatgaaaaagaggcggaaagagaaagggctgagcctgcagagcagccggatagagaagggaaaccagatgcctctcaagcgcttcagcatggaaggcatctccaacattctgcagagtggcatccgccagacctttggctcctcaggaactgacaaacagtatctgaacacagtcattccttacgagaagaaagcctctcctccctcagtggaagacctgcagatgctgacaaacattctctttgccatgaaggaggataatgagaaggtgcctactttgctaacggactacattttaaaagtgctctgccctacctaaccttgccctttggagcagcctcgctgcaggaggtcactgagcaagagtcattccatcacagggactgcatgagaccatgtaacctccgacatgtatttaaacgtgtatagcttaacctggattaaacacgagcaagcgcgcggggtcctttgccgttggcttctagtgctagtaatcattggatgcatgatggggcagggccggtgatggtgcctcccccttgctggtgtcaggagaggggaaggcagccgctttcaccgctcattatgtagtctggctacagccctcaaaaacagcttatactcttaagactaattttgaaataaaaccttcatttaattaatattcttaaaaaaaaaaaaaaaaa

SEQ ID NO: 167 - DNA, 2076 bp, Artificial Sequence
  SYNGR3
cgccgcggccggcgcgcgctcccgggaggcggcagcggctgcagcgttggtagcatcagcatcagcatcagcggcagcggcagcggcctcgggcggggccggccggacggacaggcggacagaaggcgccaggggcgcgcgtcccgcccgggccggccatggagggcgcctccttcggcgcgggccgcgcaggggccgccctggaccccgtgagctttgcgcggcggccccagaccctgctccgggtcgcgtcctgggtgttctccatcgccgtcttcgggcccatcgtcaacgagggctacgtgaacaccgacagcggccccgagctgcgctgcgtgttcaacgggaacgcgggcgcctgccgcttcggcgtcgcgctgggcctcggagccttcctcgcctgcgccgccttcctgctgctcgatgtgcgcttccagcaaatcagcagcgtccgcgaccgccggcgcgcggtgttgctggacctgggcttctcaggactctggtccttcctgtggttcgtgggcttctgcttcctcaccaatcagtggcagcgcacggcgccagggccggccacgacgcaggcgggggacgcggcgcgggccgccatcgccttcagcttcttctccatcctcagctgggtggcgctcaccgtgaaggccctgcagcggttccgcctgggcaccgacatgtcactcttcgccaccgaacagctgagcaccggggcgagccaggcctaccccggctatccggtgggcagcggcgtggagggcaccgagacctaccagagcccgcccttcaccgagaccctggacaccagccccaaagggtaccaggtgcccgcctactagcggctggcaggcacagaccagggctccaaggccaccccaccaacgcaggccccagggtctccgggacctcccttgggtccttccagctcagtgccgcggacagagtaggtggccgctttgcgccatccggggccaagagggggtggacccgcgtgtctgggctgcccctgccaagttcccccagtccctcagcacctggccccaggactgaggtcctgagaaggggatagcactgcccaggacgtgtgtccctagcctggaatggactggcctggggaaggctttcccctcttgggccacacctgctcactctggggttgggggtccagctgccctctacgatcaggtgcaggggctgcccaggacaaagcgggggcaggggaaagacaccaccctcgccccaagactggggatcctggccactgttcccatcccatgtccctgtgggtagtgactgtctcgtttctgtcatggtggtgcgtcccgtccggagccactctccactttctctcacaggctgctagaacagcccagccctgtcagtgttgtgatcatggtccagtcttcgggtttcacctcctagtactccacaagctgctcctctctctgtggccccggcccctgcccaggtgtgggtggttctggccaggaaggcacaaggtagctgtgggccaagacaccagccctgtcctagcccttcagtaagaccttgccaggagaggagaaggatgcctgggtgccaggcaagacaagcccctcagcaggagagaggcccagaggctccagctggccaccgtgccccacaagatggcccctgtgtggttccctttaccttggcttcctggcccagtccctgcctctccacctgcaccctgcttcctggcccagtcccaggttggagtccctctgcatagctgactactcatgcattgctcaaagctggcttttcacattaagtcaacaccaaacgtggttgccacatttcatcagacagacacctccctctggagatgcagttgagtgacaaccttgttacattgtagcctagaccaattctgtgtggatatttaagtgaacatgtttacaatttttgtatatatcactctctccctctcctgaaagaccagagattgtgtattttcagtgtcccatgttccgactgcaccttctttacaataaagactgtaactgagctgactgtgaaaaaaaaaaaaaaaaaaaaaaaaaa

SEQ ID NO: 168 - DNA, 2761 bp, Artificial Sequence
  NAP1L3
aaatgaggagcgaactaaaggcacactgggaacgaaattaacgggaggtctgactgcaaggggagggggctcgcgatctaaaacgagaagagatctcggggtctcatactgcgccattcggctgcggtacatctcggcactctagctgcagccgggagaggccttgccgccaccgctgtcgcccaagcctccactgccgctgccacctcagcgccggcctctgcatccccagctccagctccgctctgcgccgctgctgccatcgccgctgccacctccgcagcccgggcctccgccgccgccactcaagcatccgtgagtcattttctgcccatctctggtcgcgcggtctccctggtagagtttgtaggcttgcaagatggcagaagcagattttaaaatggtctcggaacctgtcgcccatggggttgccgaagaggagatggctagctcgactagtgattctggggaagaatctgacagcagtagctctagcagcagcactagtgacagcagcagcagcagcagcactagtggcagcagcagcggcagcggcagcagcagcagcagcagcggcagcactagcagccgcagccgcttgtatagaaagaagagggtacctgagccttccagaagggcgcggcgggccccgttgggaacaaatttcgtggataggctgcctcaggcagttagaaatcgtgtgcaagcgcttagaaacattcaagatgaatgtgacaaggtagataccctgttcttaaaagcaattcatgatcttgaaagaaaatatgctgaactcaacaagcctctgtatgataggcggtttcaaatcatcaatgcagaatacgagcctacagaagaagaatgtgaatggaattcagaggatgaggagttcagcagtgatgaggaggtgcaggataacacccctagtgaaatgcctcccttagagggtgaggaagaagaaaaccctaaagaaaacccagaggtgaaagctgaagagaaggaagttcctaaagaaattcctgaggtgaaggatgaagaaaaggaagttcctaaagaaattcctgaggtaaaggctgaagaaaaagcagattctaaagactgtatggaggcaacccctgaagtaaaagaagatcctaaagaagtcccccaggtaaaggcagatgataaagaacagcctaaagcaacagaggctaaggcaagggctgcagtaagagagactcataaaagagttcctgaggaaaggcttcaggacagtgtagatcttaaaagagctaggaagggaaagcctaaaagagaagaccctaaaggcattcctgactattggctgattgttttaaagaatgttgacaagctcgggcctatgattcagaagtatgatgagcccattctgaagttcttgtcggatgttagcctgaagttctcaaaacctggccagcctgtaagttacacctttgaatttcattttctacccaacccatacttcagaaatgaggtgctggtgaagacatatataataaaggcaaaaccagatcacaatgatcccttcttttcttggggatgggaaattgaagattgcaaaggctgcaagatagactggagaagaggaaaagatgttactgtgacaactacccagagtcgcacaactgctactggagaaattgaaatccagccaagagtggttcctaatgcatcattcttcaacttctttagtcctcctgagattcctatgattgggaagctggaaccacgagaagatgctatcctggatgaggactttgaaattgggcagattttacatgataatgtcatcctgaaatcaatctattactatactggagaagtcaatggtacctactatcaatttggcaaacattatggaaacaagaaatacagaaaataagtcaatctgaaagatttttcaagaatcttaaaatctcaagaagtgaagcagattcatacagccttgaaaaaagtaaaaccctgacctgtaacctgaacactattattccttatagtcaagtttttgtggtttcttggtagtctatattttaaaaatagtcctaaaaagtgtctaagtgccagtttattctatctaggctgttgtagtataatattcttcaaaatatgtaagctgttgtcaattatctaaagcatgttagtttggtgctacacagtgttgatttttgtgatgtcctttggtcatgtttctgttagactgtagctgtgaaactgtcagaattgttaactgaaacaaatatttgcttgaaaaaaaaagttcatgaagtaccaatgcaagtgttttatttttttcttttttccagcccataagactaagggtttaaatctgcttgcactagctgtgccttcattagtttgctatagaaatccagtacttatagtaaataaaacagtgtattttgaagtttgactgcttgaaaaagattagcatacatctaatgtgaaaagaccacatttgattcaactgagaccttgtgtatgtgacatatagtggcctataaatttaatcataatgatgttattgtttaccactgaggtgttaatataacatagtatttttgaaaaagtttcttcatcttatattgtgtaattgtaaactaaagataccgtgttttctttgtattgtgttctaccttccctttcactgaaaatgatcacttcatttgatactgtttttcatgttcttgtattgcaacctaaaataaataaatattaaagtgtgttatactataaaaatctaaaa

SEQ ID NO: 169 - DNA, 2935 bp, Artificial Sequence
  OLFM4
ttttcctacatgctggccatggggaaatcaccactgggcactataagaagcccctgggctctctgcagagccagcggctccagctaagaggacaagatgaggcccggcctctcatttctcctagcccttctgttcttccttggccaagctgcaggggatttgggggatgtgggacctccaattcccagccccggcttcagctctttcccaggtgttgactccagctccagcttcagctccagctccaggtcgggctccagctccagccgcagcttaggcagcggaggttctgtgtcccagttgttttccaatttcaccggctccgtggatgaccgtgggacctgccagtgctctgtttccctgccagacaccacctttcccgtggacagagtggaacgcttggaattcacagctcatgttctttctcagaagtttgagaaagaactttccaaagtgagggaatatgtccaattaattagtgtgtatgaaaagaaactgttaaacctaactgtccgaattgacatcatggagaaggataccatttcttacactgaactggacttcgagctgatcaaggtagaagtgaaggagatggaaaaactggtcatacagctgaaggagagttttggtggaagctcagaaattgttgaccagctggaggtggagataagaaatatgactctcttggtagagaagcttgagacactagacaaaaacaatgtccttgccattcgccgagaaatcgtggctctgaagaccaagctgaaagagtgtgaggcctctaaagatcaaaacacccctgtcgtccaccctcctcccactccagggagctgtggtcatggtggtgtggtgaacatcagcaaaccgtctgtggttcagctcaactggagagggttttcttatctatatggtgcttggggtagggattactctccccagcatccaaacaaaggactgtattgggtggcgccattgaatacagatgggagactgttggagtattatagactgtacaacacactggatgatttgctattgtatataaatgctcgagagttgcggatcacctatggccaaggtagtggtacagcagtttacaacaacaacatgtacgtcaacatgtacaacaccgggaatattgccagagttaacctgaccaccaacacgattgctgtgactcaaactctccctaatgctgcctataataaccgcttttcatatgctaatgttgcttggcaagatattgactttgctgtggatgagaatggattgtgggttatttattcaactgaagccagcactggtaacatggtgattagtaaactcaatgacaccacacttcaggtgctaaacacttggtataccaagcagtataaaccatctgcttctaacgccttcatggtatgtggggttctgtatgccacccgtactatgaacaccagaacagaagagattttttactattatgacacaaacacagggaaagagggcaaactagacattgtaatgcataagatgcaggaaaaagtgcagagcattaactataacccttttgaccagaaactttatgtctataacgatggttaccttctgaattatgatctttctgtcttgcagaagccccagtaagctgtttaggagttagggtgaaagagaaaatgtttgttgaaaaaatagtcttctccacttacttagatatctgcaggggtgtctaaaagtgtgttcattttgcagcaatgtttaggtgcatagttctaccacactagagatctaggacatttgtcttgatttggtgagttctcttgggaatcatctgcctcttcaggcgcattttgcaataaagtctgtctagggtgggattgtcagaggtctaggggcactgtgggcctagtgaagcctactgtgaggaggcttcactagaagccttaaattaggaattaaggaacttaaaactcagtatggcgtctagggattctttgtacaggaaatattgcccaatgactagtcctcatccatgtagcaccactaattcttccatgcctggaagaaacctggggacttagttaggtagattaatatctggagctcctcgagggaccaaatctccaacttttttttcccctcactagcacctggaatgatgctttgtatgtggcagataagtaaatttggcatgcttatatattctacatctgtaaagtgctgagttttatggagagaggcctttttatgcattaaattgtacatggcaaataaatcccagaaggatctgtagatgaggcacctgctttttcttttctctcattgtccaccttactaaaagtcagtagaatcttctacctcataacttccttccaaaggcagctcagaagattagaaccagacttactaaccaattccaccccccaccaacccccttctactgcctactttaaaaaaattaatagttttctatggaactgatctaagattagaaaaattaattttctttaatttcattatgaacttttatttacatgactctaagactataagaaaatctgatggcagtgacaaagtgctagcatttattgttatctaataaagaccttggagcatatgtgcaacttatgagtgtatcagttgttgcatgtaatttttgcctttgtttaagcctggaacttgtaagaaaatgaaaatttaatttttttttctaggacgagctatagaaaagctattgagagtatctagttaatcagtgcagtagttggaaaccttgctggtgtatgtgatgtgcttctgtgcttttgaatgactttatcatctagtctttgtctatttttcctttgatgttcaagtcctagtctataggattggcagtttaaatgctttactcccccttttaaaataaatgattaaaatgtgctttgaaaaaagtcaaaaaaaaaaaaaaaaa

SEQ ID NO: 170 - DNA, 1882 bp, Artificial Sequence
  AQP3
agcgctcctataaagggagccaccagcgctggaggccgctgctcgctgcgccaccgcctcccgccacccctgcccgcccgacagcgccgccgcctgccccgccatgggtcgacagaaggagctggtgtcccgctgcggggagatgctccacatccgctaccggctgctccgacaggcgctggccgagtgcctggggaccctcatcctggtgatgtttggctgtggctccgtggcccaggttgtgctcagccggggcacccacggtggtttcctcaccatcaacctggcctttggctttgctgtcactctgggcatcctcatcgctggccaggtctctggggcccacctgaaccctgccgtgacctttgccatgtgcttcctggctcgtgagccctggatcaagctgcccatctacaccctggcacagacgctgggagccttcttgggtgctggaatagtttttgggctgtattatgatgcaatctggcacttcgccgacaaccagctttttgtttcgggccccaatggcacagccggcatctttgctacctacccctctggacacttggatatgatcaatggcttctttgaccagttcataggcacagcctcccttatcgtgtgtgtgctggccattgttgacccctacaacaaccccgtcccccgaggcctggaggccttcaccgtgggcctggtggtcctggtcattggcacctccatgggcttcaactccggctatgccgtcaaccctgcccgggactttggcccccgcctttttacagcccttgcgggctggggctctgcagtcttcacgaccggccagcattggtggtgggtgcccatcgtgtccccactcctgggctccattgcgggtgtcttcgtgtaccagctgatgatcggctgccacctggagcagcccccaccctccaacgaggaagagaatgtgaagctggcccatgtgaagcacaaggagcagatctgagtgggcaggggccatctccccactccgctgccctggccttgagcatccactgactgtccaagggccactcccaagaagcccccttcacgatccaccctttcaggctaaggagctccctatctaccctcaccccacgagacagccccttcaggatttccactggaccttgcccaaatagcaccttaggccactgcccctaagctggggtggaaccggaatttgggtcaatacatccttttgtctcccaagggaagagaatgggcagcaggtatgtgtgtgtgtgcatgtgtgtgcatgtgtgtgcatgtgtgtgcaggggtgtgtgtgtgtggggggggttcccagatattcagggcaagggaccagtcggaagggattctggctattgggggagcccagagacaggggaaggcagcctgtccatctgtgcataaggagaggaaagttccagggtgtgtatgtttcaggggcttcacatggaggagctgcagatagatatgtgtttctgtgtatgtgtatgtctgcctttttttctaagtgggggcttctacaggcttttgggaagtagggtggatgtgggtagggctgggaggagggggccacagcttaggtttggagctctggatgtacatacataagtaggagcagtgggacgtgtttctgtcataatgcaggcatgaagggtggagtgaagtcaggtcataagtttcatgtttgcttttgttttgttttgtttttaatgtatgtagcagatgttacagtcttagggatccgggatgggagaccccactttagaaagggtcgtcactcctttaatcctctactcaacaatgtactcttttacttttatattaaaaaaaataaaataaatatgtgcctaaaacctccaaaaaaaaaaaa

SEQ ID NO: 171 - DNA, 6958 bp, Artificial Sequence
  KIF5C
cggcagagcgcgctggtgctgatgcaggatggctgagcgcgcaggagcccgggaggtctgagccgggcgaggctcgctccctgcgcatcgcctcctccgcccgccgcgtggtcgcgggcaggtgggccggggggcgctgggcaggggcggggcagggccagggcaggccggtctgcagccggaggggccggagcggagaagctgcccaccttcccgggctcggagcggccggggctgctcagccggccgggctcgcgatgacctgctgagaagcgtcgtcggaggctgcaggaggcggcctagctgtgggcggtgcagctcgcggcctcctccctcgtcgttcccggccccggccccccacccatccccgtgccccctccctaccgccggccgagatggcggatccagccgaatgcagcatcaaagtgatgtgccggttccggcccctcaacgaagcggagatcctccgcggggacaaattcatccccaaatttaaaggcgatgagaccgtggtgatcgggcaagggaagccatatgtcttcgacagagtgctacctcccaacacgacccaagagcaggtttacaatgcatgtgcgaagcaaattgtcaaagatgtccttgaaggttataacgggacgatttttgcgtatgggcagacttcatcaggaaaaacccacaccatggaggggaagctgcatgacccccagctcatggggatcatcccacgaattgcccatgatatctttgaccatatctactccatggatgagaacctggagtttcacataaaggtttcctattttgagatctacttggacaaaataagggacttacttgatgtatccaagaccaacttggctgttcatgaagataaaaacagagtcccgtatgtaaaggggtgcactgagcggtttgtgtcgagccctgaggaagtcatggatgtaatagatgaaggcaaagcaaaccgacacgtggctgtgacaaacatgaatgaacacagctctagaagtcacagtatcttcctgataaatattaaacaagagaatgtagagactgaaaaaaaactcagtgggaaactttatttggttgatttggctgggagcgaaaaggtcagcaaaactggtgccgagggagctgttcttgacgaagctaaaaatatcaataagtctttgtctgctcttggaaatgtgatctctgctttggcagaagggacaaaaacacatgtgccataccgggacagcaagatgactcggattcttcaggactctttgggtgggaactgcagaaccaccatcgtcatttgctgttctccttctgtcttcaatgaggctgagaccaagtccacactgatgttcggacagagagctaagaccatcaagaatacagtctctgtgaacctagaactgacagcagaagaatggaagaagaaatatgaaaaagagaaagagaaaaacaagactttgaagaatgttatccagcatctggagatggagctaaacaggtggaggaatggagaagctgtgcctgaggatgaacagatcagtgccaaggaccagaagaacctggagccttgtgataacacccccatcatagacaatattgctcctgttgttgctggcatctctacagaggagaaagagaagtacgatgaggagatctccagtctctacagacaactggatgacaaggatgatgaaattaaccagcagagccagctggctgaaaagctgaagcaacagatgttggatcaggatgagcttttagcttccacaagaagagactatgagaagatacaggaggagctgacacgtctccagattgaaaatgaggcagccaaggatgaggtgaaagaagttctccaggccctggaggagctggctgtcaattatgaccagaaatcacaggaagtggaggataagacccgggccaatgagcagctgacagacgagctggcccagaaaacgactacattgacaaccacacagagagagctgagccagctacaagagcttagcaaccaccagaagaaaagggcaactgagatcctgaatttgctgttgaaagatctgggggagataggtggaattattggcaccaatgatgtgaaaactttggcagatgtgaatggagtcattgaggaggagtttaccatggcccgcctgtacatcagcaagatgaagtcagaggtcaagtccctggtgaaccgcagcaaacagctcgagagcgcccagatggactccaacaggaagatgaatgccagcgagcgggagctggcagcctgccagctgctcatctcccagcacgaagccaagatcaagtctctgacagactacatgcagaacatggaacagaagaggaggcagctagaagagtcccaggactcgctcagcgaagagctggcaaagctccgagcccaggaaaaaatgcacgaagtcagcttccaggataaggagaaggaacatctgacgcggttgcaggatgctgaagaaatgaagaaggcgctggagcagcagatggagagccaccgggaagctcaccagaagcagctgtccagactccgagacgaaattgaggagaagcagaaaatcattgatgagattcgggatttgaatcagaaactgcaactggaacaggagaagcttagttctgattataacaagctgaaaatagaggaccaagagagagaaatgaagctggaaaagctcttattgctcaacgataaaagggaacaagccagagaagacctcaaagggctggaggagacagtgtctagagaattgcagacactgcacaaccttcggaaactctttgtccaggatctgaccacccgagttaaaaaaagtgtggagttggacaacgatgatggagggggcagtgctgcccagaagcagaaaatttccttcttggagaataacctggagcagctcaccaaagttcacaagcagctggtccgggacaacgcagacctgcgctgtgaactgcccaagctggagaagcggctgcgtgccacggcggagcgcgtcaaggctctggagagcgcgctgaaggaggccaaggagaacgccatgcgggaccgtaagcgctaccagcaggaggtggatcgtatcaaggaggccgtgcgggccaagaacatggccagaagggcccattcagcccagatcgccaagcccatccgccccggacactacccggcctcatctccaacggccgtccatgccattcgagggggaggaggcagctcttcaaattccactcactaccagaaataaatacaaaatatgactccacgtagcatgtcaaggactacattaatcaccaattcctttatttttccccccctacagtttccattttttttttatacttgcttactccagccatctgcagtacaccagtttcaggtcttttgagctgtgtagagtttctgtgtgtacagatgtgtgctcggacttttctctttttgagaaatctgaaggagatggttgcagaagatccacttactactgagaaccattaccaccgactcggcctccggggtgttgggtggtttctgggtggttcctggagcctcctctgggcagtgcactgtcccatctgtacgccctaatgtgccattccctagaggggaacaaccaagtgccgtggaggcagatgatcatggtctgcctcaactgtctggtttcctgtaaaataaacacattgttttatatttttagggaacaaaaagtgctgctatagggttcaaagttttccttctgaacacttttccgaaacaaattaccccaaagacacattttgaatatcctggtcacatctttggatctgtaaaatataccttttagtatggcacctgttaaaatgcaaagcaaatttctttggggcagaaaaacaatctgacagtagcagtgtagaatttgttcattcaaatacatctgtgtaaatgcaaaaagtcataaaattcacctccgagctgcttgcttttgaacctgcagcaactagtcttagccggcccggtttgaacatcgttctttcagaagtgctgaaaatgctgcaaagttggataagtggaaatgtggctgcccctctcctcactacttcctctctgatcgttctgaagcttgcattgggaatggctgctttctctaaccattttcagcttgagtgggtattgctgaagaaatccaacatcattccagcagttgaaaaaggaagccttcgggagaaagtgcttgtcaaaattttgttctttgtgcttgtgtatgagtaagttgccatgaataagttattattttaacccataattggcgactgtttatatgaattctttctttggcaccaaataggtttcatcttcttaggcacaattagaaaaaatccacatagatggatattttacatttagttattgctttatccaaatacatgaatctaaagctgaatcaacccttacttccagttgtgcttattaagaagatcaatttccaagtagtaaagttttcagggaaactgactgtgctgctatttgttttgacaaatttgggggtaagtcaatgacaaccaaaccaatctcggtggaaactcctatcctatcatgttgtgtgcccaagatgagtgagctggcactgtgccctgaagctttcaccactgtaatgaaatatatgccaggggagactttgggcttttctcatgactgtgtgggtcgaaggtagctcaagtgtgtgtgtgtgtgtgtgtgtgtgtgtgtgtgtgtgtgtgtgtgtatgtgtgtaaagtgctaagaactgtgcattgacatccaaacatttcttgtacaaaatttccctagcaaagcaaacctgctttgacttaatttatttgttaaatgttgcactttgtttatgtatgttttgtttttggtggggaataaggagagagaggacgacaaattctattgaagtatttattttgtgaagatggcaattttgcatttgtttaaatttttttcattctttaattttgttatcagtgccagcccaatatacctgctctaccattatttgcggtctgataaaagggtccttgtggggcaggttttgcaaagcttatcaggtaataacatatgccacataaccttgttgatatgtttgcttctgatttgggaagctaaacattggtgtttgagaggattgccaattattaattgtcattaccactactctccattactttttgtttggaaattgaacaaaggtcagtaatggtttttggctcttgttaatatccatcataaaatagattgttttagattctttccagggtgatttttccctgggtaccccgtttctacttctaaagaattgcttggcactttcatgtttcaaagggaaacattcgcttgtagttccattttacttgatctctacaagggactgacaacatttgctttacttttattcacagagaaagttggctttgatgtctcttaaagataattctgctagttgctgatcagccagtcagttcacctagcttcaatctttataggacttctaatctaattttcctatagtgtgactaaaagggaggcaaattattggaacggattattcaaatggatccttaaatattgctatgtataataagccagttattatatcaggaccatgttctctgtaggccactttctaaaaaagccacatatgtgcaattttcaggtttttagactattgctccctgtactttaaatgtaaaaaccacacttctgaacaactaagctcatgaatatgattttggttatatgcagcttttgactagcatgtattgtgtctttttctcctctatgaataattttatatttcatgctacttcttgaaagtttactctttgatgctctaagagaacagccagatggtttatatgaataatctttatctgcaggatggtggattggtaaattaggagaatgttgtttgagatatcaagatttatgtctgggaactaaaatatataatgccaaatgtgtttttgtcaattactagagaattctgtgcaaacatatcatctcttcaaatgctgcacactttgcttttgttaaacagcaggtagtagacagaacaataacagtttcgcgttaagacttttaaaggaaatagaatcgtgattaagaaatcagaatttatagatatattgggataaatgaagaaataaaaatgtttgtctagaatgtagcatctagtgactttttaaagccctaacgtttacataaagaagctctagttcttatagaaataacaaagcaaataaaagttcttaacaatcccctctttcgaagtgcatttttttaaagcagggcaggagacatttggactctagctatatgacatactgggaaaggcagagggtggagggaagatttcacttcattgtctagcccagaatcttgagcaagctaaagaaaccatcataatctaaaattgcttcatttaacactaacaatttagactttttaaaccaagcattgaataatggctggataactgccgaagtaagcgccgctccatgaagtctgcttacttatttaaaaattgtgtatcagttttaaatactgttcattgtgtgcagatataaggggaatagggcattctgtagaattatacatgtctagtttgtaaagtgtgtcctgtgtactgcagatgtgtgttctctgggctttatgtatctgtacagtagctttcacattaaaaaaattgtggacaaacttgtccggggggtttgaggggagaatggtggtttatatcaataacgatgctgtactatagtccatgtaacaaaagatctggaagtcaccctcctctggcccacggaaaattttggtaatcttctaggttctaaaatgaagatgtatgggtactctggcagactgcatgttgtataatttgaaaaatactaaaagtggaaaataaaattgaattaaactttg

SEQ ID NO: 172 - DNA, 1216 bp, Artificial Sequence
  MYL9
gcccccgcctggagtccagacccgacggccggcccagttccacgcacccagcgagcccaagcgccttctccgcaccagggaagccccacccaccagaagccaagatgtccagcaagcgggccaaagccaagaccaccaagaagcggccacagcgggccacatccaatgtcttcgcaatgtttgaccagtcccagatccaggagtttaaggaggctttcaacatgattgaccagaaccgtgatggcttcattgacaaggaggacctgcacgacatgctggcctcgctggggaagaaccccacagacgaatacctggagggcatgatgagcgaggccccggggcccatcaacttcaccatgttcctcaccatgtttggggagaagctgaacggcacggaccccgaggatgtgattcgcaacgcctttgcctgcttcgacgaggaagcctcaggtttcatccatgaggaccacctccgggagctgctcaccaccatgggtgaccgcttcacagatgaggaagtggacgagatgtaccgggaggcacccattgataagaaaggcaacttcaactacgtggagttcacccgcatcctcaaacatggcgccaaggataaagacgactaggccaccccagccccctgacaccccagcccccgccagtcacccctccccgcacacacccgtccataccagctccctgcccatgaccctcgctcagggatccccctttgaggggttagggtcccagttcccagtggaagaaacaggccaggagaagtgcgtgccgagctgaggcagatgttcccacagtgaccccagagccctgggctatagtctctgacccctccaaggaaagaccaccttctggggacatgggctggagggcaggacctagaggcaccaagggaaggccccattccggggctgttccccgaggaggaagggaaggggctctgtgtgccccccaggaggaagaggccctgagtcctgggatcagacaccccttcacgtgtatccccacacaaatgcaagctcaccaaggtcccctctcagtccccttccctacaccctgaccggccactgccgcacacccacccagagcacgccacccgccatgggagtgtgctcaggagtcgcgggcagcgtggacatctgtcccagagggggcagaatctccaatagaggactgagcactgctaaaaaaaaaaaaaaaaaaa

SEQ ID NO: 173 - DNA, 3216 bp, Artificial Sequence
  FOXG1
taattcctgaggggtggttgctgcttttgctacatgacttgccagcgcccgagcctgcggtccaactgcgctgctgccggagcgctcagtgccgccgctgccgcccgcgccccccgcgccccgttcggcacccaccggtcgccgccgcccgccgcgccgctgtcccgctcccgcgccgccgccgccgtttccccccgacgactgggtgatgctggacatgggagataggaaagaggtgaaaatgatccccaagtcctcgttcagcatcaacagcctggtgcccgaggcggtccagaacgacaaccaccacgcgagccacggccaccacaacagccaccacccccagcaccaccaccaccaccaccaccatcaccaccacccgccgccgcccgccccgcaaccgccgccgccgccgcagcagcagcagccgccgccgccgccgcccccggcaccgcagcccccccagacgcggggcgccccggccgccgacgacgacaagggcccccagcagctgctgctcccgccgccgccaccgccaccaccggccgccgccctggacggggctaaagcggacgggctgggcggcaagggcgagccgggcggcgggccgggggagctggcgcccgtcgggccggacgagaaggagaagggcgccggcgccgggggggaggagaagaagggggcgggcgagggcggcaaggacggggaggggggcaaggagggcgagaagaagaacggcaagtacgagaagccgccgttcagctacaacgcgctcatcatgatggccatccggcagagccccgagaagcggctcacgctcaacggcatctacgagttcatcatgaagaacttcccttactaccgcgagaacaagcagggctggcagaactccatccgccacaatctgtccctcaacaagtgcttcgtgaaggtgccgcgccactacgacgacccgggcaagggcaactactggatgctggacccgtcgagcgacgacgtgttcatcggcggcaccacgggcaagctgcggcgccgctccaccacctcgcgggccaagctggccttcaagcgcggtgcgcgcctcacctccaccggcctcaccttcatggaccgcgccggctccctctactggcccatgtcgcccttcctgtccctgcaccacccccgcgccagcagcactttgagttacaacggcaccacgtcggcctaccccagccaccccatgccctacagctccgtgttgactcagaactcgctgggcaacaaccactccttctccaccgccaacggcctgagcgtggaccggctggtcaacggggagatcccgtacgccacgcaccacctcacggccgccgcgctagccgcctcggtgccctgcggcctgtcggtgccctgctctgggacctactccctcaacccctgctccgtcaacctgctcgcgggccagaccagttactttttcccccacgtcccgcacccgtcaatgacttcgcagagcagcacgtccatgagcgccagggccgcgtcctcctccacgtcgccgcaggccccctcgaccctgccctgtgagtctttaagaccctctttgccaagttttacgacgggactgtctgggggactgtctgattatttcacacatcaaaatcaggggtcttcttccaaccctttaatacattaacatccctgggaccagactgtaagtgaacgttttacacacatttgcattgtaaatgataattaaaaaaataagtccaggtattttttattaagcccccccctcccatttctgtacgtttgttcagtctctagggttgtttattattctaacaaggtgtggagtgtcagcgaggtgcaatgtggggagaatacattgtagaatataaggtttggaagtcaaattatagtagaatgtgtatctaaatagtgactgctttgccatttcattcaaacctgacaagtctatctctaagagccgccagatttccatgtgtgcagtattataagttatcatggaactatatggtggacgcagaccttgagaacaacctaaattatggggagaattttaaaatgttaaactgtaatttgtatttaaaaagcattcgtagtaaaggtgcccaagaaattattttggccatttattgttttgtccttttctttaaagaactgtttttttttcttttgtttacttttagaccaaagattgggttctagaaaatgcacttggtatactaagtattaaaacaaacaaaaaggaaagttgtttcagttggcaacactgcccattcaattgaatcagaaggggacaaaattaacgattgccttcagtttgtgttgtgtatattttgatgtatgtggtcactaacaggtcacttttattttttctaaatgtagtgaaatgttaatacctattgtacttataggtaaaccttgcaaatatgtaacctgtgttgcgcaaatgccgcataaatttgagtgattgttaatgttgtcttaaaatttcttgattgtgatactgtggtcatatgcccgtgtttgtcacttacaaaaatgtttactatgaacacacagaaataaaaaataggctaaattcatatatatcttgatacttttgtctcttttattaagtagagctaattttttaaagaccaatcaacttatagggaattcaaaggctttttcagccaaactaaaatttaaactgctcctttaatttgaactgactctaaaaatgaaaatagtatttttccctttgtgaacaaattttacaaggagcagcctatttaataaacactagctttaaacaaagtataggcttttcagctgatacctgtaagtttctgtggatatacagcaaaaagagatataatttaattttctgtgcatagctctttaccctgtgtttatttccaaatccattaatagaatgccatttatatattttgtttcaggtatattgttaatagagcttggcaaattataaataaatatatgtatatggttagatagaagtgactataatgcacacatatgtaatatatatagacacacagagcccttcagttcaggtacaatttgcgctatgaatgctgcaaacatttttgtttaaatatttgtatttatactttctaagtcagcatttatttttgtggctgtttacccacaatgaaagagttctaataaagatgtgctgaagttgcaatataaaaaaaaaaa

SEQ ID NO: 174 - DNA, 1464 bp, Artificial Sequence
  CSRP3
agtgagccgagatcgcgccactacactccagactgggcgacagagccagactccgtctcaaaaaaaaaaaaaaaaaaagagagagagcaccttaggaatcatctgcctcacacgaatattctcaggccaaggctggtgacagccttcatatatttaaagaggacaagagcccctcagactcagttgagctgaacggagtccacacaggcagacttgaccttgaccagatagtcttcaagatgccaaactggggcggaggcgcaaaatgtggagcctgtgaaaagaccgtctaccatgcagaagaaatccagtgcaatggaaggagtttccacaagacgtgtttccactgcatggcctgcaggaaggctcttgacagcacgacagtcgcggctcatgagtcggagatctactgcaaggtgtgctatgggcgcagatatggccccaaagggatcgggtatggacaaggcgctggctgtctcagcacagacacgggcgagcatctcggcctgcagttccaacagtccccaaagccggcacgctcagttaccaccagcaacccttccaaattcactgcgaagtttggagagtccgagaagtgccctcgatgtggcaagtcagtctatgctgctgagaaggttatgggaggtggcaagccttggcacaagacctgtttccgctgtgccatctgtgggaagagtctggagtccacaaatgtcactgacaaagatggggaactttattgcaaagtttgctatgccaaaaattttggccccacgggtattgggtttggaggccttacacaacaagtggaaaagaaagaatgaagaggtgcgccgtttctcagattttttgcgagcctaaaacacttgccaagtaatcctgcacagatcgatacctttccccaaatagcctctcctttgtagtcgtacattatgtgtttctcctcagaagtgatcaggtctttactgaatgttagaagaggcctttggaagaaaattatgtaaagtttaatctataacaaatgctttattatttataatgcttggaatgggagaggcaataaataaatgttttagtgctatcttgtatggctctagatcttttctttgagatagaaattttcaaaaacataaagctagttcaaaaaacgagttgcagagcatataataaatttggatgtcaactgagaaaggagtgagaaggaagaaacaatgcgcaaaggaaagcagtctttcagaatctgtcagccaagtgtctttctagttactgctaatggagaagaaaacagggggtctgggagaaaatagagaacatgatagcaaaatctaaaaggaaaatcaaaactaataaaattgctgaagagttgatccctttgtcctatcgtggggctttgtaatgttacacatctcgtgaaaactcagaaatgacaataaagcgtggcatttgcctctgtattataaatga

SEQ ID NO: 175 - DNA, 3854 bp, Artificial Sequence
  NEFL
gcgtgagtgagtacagaagggaaatgagtgagggggcatgggatctcagagaaaatcagggccctctgagcaaagtggaaaggacgaccgccgcagctcctcgggccgtagctcgaccccgccttcccttttgcgcagaatcctcgccttggctgcagcagcgcgctgcccccactggccggcgtgccgtgatcgatcgcaggctgcgtcaggagcctcccggcgtataaataggggtggcagaacggcgccgagccgcacacagccatccatcctcccccttccctctctcccctgtcctctctctccgggctcccaccgccgccgcgggccggggagccaccggccgccaccatgagttccttcagctacgagccgtactactcgacctcctacaagcggcgctacgtggagacgccccgggtgcacatctccagcgtgcgcagcggctacagcaccgcacgctcagcttactccagctactcggcgccggtgtcttcctcgctgtccgtgcgccgcagctactcctccagctctggatcgttgatgcccagtctggagaacctcgacctgagccaggtagccgccatcagcaacgacctcaagtccatccgcacgcaggagaaggcgcagctccaggacctcaatgaccgcttcgccagcttcatcgagcgcgtgcacgagctggagcagcagaacaaggtcctggaagccgagctgctggtgctgcgccagaagcactccgagccatcccgcttccgggcgctgtacgagcaggagatccgcgacctgcgcctggcggcggaagatgccaccaacgagaagcaggcgctccagggcgagcgcgaagggctggaggagaccctgcgcaacctgcaggcgcgctatgaagaggaggtgctgagccgcgaggacgccgagggccggctgatggaagcgcgcaaaggcgccgacgaggcggcgctcgctcgcgccgagctcgagaagcgcatcgacagcttgatggacgaaatctcttttctgaagaaagtgcacgaagaggagatcgccgaactgcaggcgcagatccagtacgcgcagatctccgtggagatggacgtgaccaagcccgacctttccgccgcgctcaaggacatccgcgcgcagtacgagaagctggccgccaagaacatgcagaacgctgaggaatggttcaagagccgcttcaccgtgctgaccgagagcgccgccaagaacaccgacgccgtgcgcgccgccaaggacgaggtgtccgagagccgtcgtctgctcaaggccaagaccctggaaatcgaagcatgccggggcatgaatgaagcgctggagaagcagctgcaggagctggaggacaagcagaacgccgacatcagcgctatgcaggacacgatcaacaaattagaaaatgaattgaggaccacaaagagtgaaatggcacgatacctaaaagaataccaagacctcctcaacgtgaagatggctttggatattgagattgcagcttacaggaaactcttggaaggcgaggagacccgactcagtttcaccagcgtgggaagcataaccagtggctactcccagagctcccaggtctttggccgatctgcctacggcggtttacagaccagctcctatctgatgtccacccgctccttcccgtcctactacaccagccatgtccaagaggagcagatcgaagtggaggaaaccattgaggctgccaaggctgaggaagccaaggatgagcccccctctgaaggagaagccgaggaggaggagaaggacaaggaagaggccgaggaagaggaggcagctgaagaggaagaagctgccaaggaagagtctgaagaagcaaaagaagaagaagaaggaggtgaaggtgaagaaggagaggaaaccaaagaagctgaagaggaggagaagaaagttgaaggtgctggggaggaacaagcagctaagaagaaagattgaacccccatttccttaattatttcaggaataattctcccgaaatcaggtcaaccccatcaccaaccaaccaaccagttgagttccagattctatgtgaattaaaaagtcaatatatgtataattctgagatgacttaggttggacattcaatgttgtgctatgaatttcctctttatgcagagtatctgtttgcttgcagagtggctttctggcttgctgccagcctgtgcatggaccacgcttatgagttcaggatctacggcaatgtgaatcattcagatgtttacaataaaaaacaccacatgagtaaatgaattcactaatgttaatgttaaacttcatggaaaaatagtcctttgaaccttcggtggttagcaattaaagaccctgagttatgtgcaataaatagtaaataaagttataccgaatgatgtattttttgctgtggttgttacttaattaaaataccttaaagatggcaccaatataaagtatataccagtggactattgacctccaattttttaaaaagttgaaattttaacaattaccaatacttttttttcttccttcaattggaaattctgagggatacagttatgtcatgattacttgtgaaatctctccccacaaaaattttactgataataaacatgagtaaatgagaaagtctataaataacaatagactttgcctcataacacgtgttgtgttaggttttgggatggctttctagggagcaattctgaaattacttgacagatacactctttatggtaaacaggtcatttcagagtctagagtgctaaccattacactatggaaccatgataaataggtcatttcaaactgatatgtcacaatgcaatatggatagaatatgaatcccatacattcatccctataactgcattttaaaatatagtctaaatatcatgggaggaggttaaaacctgagaacatggtacaataagaaggaataattttttatctatatataatttcaggagaagggattaaaactaccaaaggttatttgccactccactgcaaacatgttgcctgcaatcctgagctcatgatttagtgtgttgttaagcgtaattctgttgcctcaagtaaataccacttaatgctacacatttttaaacctttaaaagctacagacacaagtaatgaaattatgagtcacttaaggggggaggtaatatgcttgtatgttacattgacattgctctgcatgtctctactgggagatatttggatttcaatgatagcttgactggttggacattgcatcaaatacacgccccatgtatcctttctgtcgtaaagttaagaacgctcttgcatttgatgtggaataaatatagatgatattactatctgctattctgcctttgttctgaaacaattgctttgtcagctaatttcattcaatatttgttttttagacgatctctataagttattaatttaacctgaaaccaaagtggtctccatttaaagttacttaatccctttgtaccacctatttctagttaaatatatgttgctatgcaaataggtaaagtgcttccttgccatgatggtaatggattggaactatgaaggctctcagtgtattggcttctgtaaagatgaggcgtctcctcagaaacaaaacttttcacatttctgcttactagacctgggttgatgtacatggtaagtctcaaacagatgcaagctatgtgcaaaaagtaactttagccaaatggaaatagctggatgctttgagaattacttggttgaagtaagaaaactgtaccatcctctatcctgtgtgccataataaaatagtaaaaaacctaaaaaaaaaaaaaaaa

SEQ ID NO: 176 - DNA, 5210 bp, Artificial Sequence
  ZFYVE9
acgctggaggcttcgctgaggatccccgcctgccgcacctcggtcgtcccgccgcagccttgcgcccccggcccggctcggcggcgctcctccgggatccgcgtggctgccgcggcccgggcgccgatgcggctgggcgggtgccgggccttagcagcagtagcagccgcagctgcggctaccgcagctcctacaggagtgggaggtttcgcggcggcgcctggggccgcgccggtgccctccggaggaggctttcggctcagggacgacccccgtggccatgctgaagcggaggcggccgctgctcgaggatcaaacagagcatactgaatcagcaggactggctggtggtgcagcagacatcatgagtaagcaccgagaagtctgttccttatcacgtgtgtaaggggaaaaaggtttaaacaagtctcttaagtggtgtttcctcaccgatggagaattacttccaagcagaagcttacaacctggacaaggtgttagatgaatttgaacaaaacgaagatgaaacagtttcttctactttattggatacaaagtggaataagattctagatcccccttctcaccggctgtcatttaaccctactttggccagtgtgaatgaatctgcagtttctaatgagtcacaaccacaactgaaagtcttctccctggctcattcagctcccctgaccacagaggaagaggatcactgtgctaatggacaggactgtaatctaaatccagagattgccacaatgtggattgatgaaaatgctgttgcagaagaccagttaattaagagaaactatagttgggatgatcaatgcagtgctgttgaagtgggagagaagaaatgtggaaacctggcttgtctgccagatgagaagaatgttcttgttgtagccgtcatgcataactgtgataaaaggacattacaaaacgatttacaggattgtaataattataatagtcaatcccttatggatgcttttagctgttcactggataatgaaaacagacaaactgatcaatttagttttagtataaatgagtccactgaaaaagatatgaattcagagaaacaaatggatccattgaatagaccgaaaacagaggggagatctgttaaccatctgtgtcctacttcatctgatagtctagccagtgtctgttccccttcacaattaaaggatgacggaagtataggtagagacccctccatgtctgcgattacaagtttaacggttgattcagtaatctcatcccagggaacagatggatgtcctgctgttaaaaagcaagagaactatataccagatgaggacctcactggcaaaatcagctctcctaggacagatctagggagtccaaattccttttcccacatgagtgaggggattttgatgaaaaaagagccagcagaggagagcaccactgaagaatccctccggtctggtttacctttgcttctcaaaccagacatgcctaatgggtctggaaggaataatgactgtgaacggtgttcagattgccttgtgcctaatgaagttagggctgatgaaaatgaaggttatgaacatgaagaaactcttggcactacagaattccttaatatgacagagcatttctctgaatctcaggacatgactaattggaagttgactaaactaaatgagatgaatgatagccaagtaaacgaagaaaaggaaaagtttctacagattagtcagcctgaggacactaatggtgatagtggaggacagtgtgttggattggcagatgcaggtctagatttaaaaggaacttgcattagtgaaagtgaagaatgtgatttctccactgttatagacacaccagcagcaaattatctatctaatggttgtgattcctatggaatgcaagacccaggtgtttcttttgttccaaagactttaccctccaaagaagattcagtaacagaagaaaaagaaatagaggaaagcaagtcagaatgctactcaaatatttatgaacagagaggaaatgaggccacagaagggagtggactacttttaaacagcactggtgacctaatgaagaaaaattatttacataatttctgtagtcaagttccatcagtgcttgggcaatcttcccccaaggtagtagcaagcctgccatctatcagtgttccttttggtggtgcaagacccaagcaaccttctaatcttaaacttcaaattccaaagccattatcagaccatttacaaaatgactttcctgcaaacagtggaaataatactaaaaataaaaatgatattcttgggaaagcaaaattaggggaaaactcagcaaccaatgtatgcagtccatctttgggaaacatctctaatgtcgatacaaatggggaacatttagaaagttatgaggctgagatctccactagaccatgccttgcattagctccagatagcccagataatgatctcagagctggtcagtttggaatttctgccagaaagccattcaccactctgggtgaggtggctccagtatgggtaccggattctcaggctccaaattgcatgaaatgtgaagccaggtttacattcaccaaaaggaggcatcactgcagagcatgtgggaaggttttctgtgcttcctgctgtagcctgaaatgtaaactgttatacatggacagaaaggaagctagagtgtgtgtaatctgccattcagtgctaatgaatgctcaagcctgggagaacatgatgagtgcctcaagccagagccctaaccctaacaatcctgctgaatactgttctactatccctcccttgcagcaagctcaggcctcaggagctctgagctctccacctcccactgtgatggtacctgtgggagttttaaagcaccctggagcagaagtggctcagcccagagagcagaggcgagtttggtttgctgatgggatcttgcccaatggagaagttgctgatgcagccaaattaacaatgaatggaacttcctctgcaggaaccctggctgtgtcacacgacccagtcaagccagtaactaccagtcctctaccagcagagacggatatttgtctattctctgggagtataactcaggttggaagtcctgttggaagtgcaatgaatcttattcctgaagatggccttcctcccattctcatctccactggtgtaaaaggagactatgctgtggaagagaaaccatcacagatttcagtaatgcagcagttggaggatggtggccctgacccacttgtatttgttttaaatgcaaatttgttgtcaatggttaaaattgtaaattatgtgaacaggaagtgctggtgtttcacaaccaagggaatgcatgcagtgggtcagtctgagatagtcattcttctacagtgtttaccggatgaaaagtgtttgccaaaggatatctttaatcactttgtgcagctttatcgggatgctctggcagggaatgtggtgagcaacttgggacattccttcttcagtcaaagtttccttggcagtaaagaacatggtggattcttatatgtgacatctacctaccagtcactgcaagacctagtactcccaaccccaccttacttgtttgggattcttatccagaaatgggaaactccttgggctaaagtatttcctatccgtctgatgttgagacttggagctgaatatcgactttatccatgcccactattcagtgtcagatttcggaagccattgtttggagagacggggcataccatcatgaatcttcttgcagacttcagaaattaccagtataccttgccagtagttcaaggtttggtggttgatatggaagttcggaaaactagcatcaaaattcccagcaacagatacaatgagatgatgaaagccatgaacaagtccaatgagcatgtcctggcaggaggtgcctgcttcaatgaaaaggcagactctcatcttgtgtgtgtacagaatgatgatggaaactatcagacccaggctatcagtattcacaatcagcccagaaaagtgactggtgccagtttctttgtgttcagtggcgctctgaaatcctcttctggataccttgccaagtccagtattgtggaagatggtgttatggtccagattactgcagagaacatggattccttgaggcaggcactgcgagagatgaaggacttcaccatcacctgtgggaaggcggacgcggaggaaccccaggagcacatccacatccagtgggtggatgatgacaagaacgttagcaagggtgtcgtaagtcctatagatgggaagtccatggagactataacaaatgtgaagatattccatggatcagaatataaagcaaatggaaaagtaatcagatggacagaggtgtttttcctagaaaacgatgaccagcacaattgcctcagtgatcctgcagatcacagtagattgactgagcatgttgccaaagctttttgccttgctctctgtcctcacctgaaacttctgaaggaagatggaatgaccaaactgggactacgtgtgacacttgactcagatcaggttggctatcaagcagggagcaatggccagccccttccctcgcagtacatgaatgatctggacagcgccttggtgccggtgatccatggaggggcctgccagcttagtgagggccccgttgtcatggaactcatcttttatattctggaaaacatcgtataaacagagaagacttcatttttttctgttcagacttgttgcaacagcagtcatacccaaatcatttgcactttaaaactggaagattaagcttttgttaacactattaatggggtggggaatagggtgggagtgggggtttgggagacgggtgggaaagggtggttggggggaccgatgttccataattctaagtcttctatgcattgtccaccaagaagatctgggcagcttctgttcctgcacaacagttatgctatccttgcagctaatccccttctgttactgtttagacaagaattccgctcctctctcaagatttacttatggtcatgtgctcagaaatgctcaaatgggtacaaccatcaccaagggtgggatgggagggcagaggggaaataaaatataaagcatcagttcttgcactctttgtacagaattggtataaaaaggataattccacactgaaaaaaaaaaaaaaaa

SEQ ID NO: 177 - DNA, 10675 bp, Artificial Sequence
  SHANK2
gtctggaaatctctccaggcaccctgctttggccctctagaatacagacagttcctgctctaagaggccatctgtgaggctcagtctcccaacacctctgacacaggcagccatgccgcgcagcccaacatccagcgaggacgagatggcccagagcttctccgactactccgtggggtcggagtcagacagctccaaagaagagaccatctatgacacgatccgggccactgcggagaagccgggcggtgccaggacggaggagagccagggcaacacgctggtgatccgcgtggtcatccatgacctgcagcagacgaaatgcattcgatttaacccggatgccacagtgtgggttgcaaagcagcggatcctgtgtacattaacccagagtttgaaagatgtcctgaactacggcctgttccagccggccagcaatgggcgtgacggcaagttcctggatgaggagcggctcctgcgcgagtacccacagcccgtgggtgagggcgttccttccctggagtttcgatacaagaagcgggtgtataaacaagccagtctcgatgagaaacagttggccaagctccacacgaagaccaatctgaagaaatgcatggatcacattcagcatcgcttggtggagaagatcaccaagatgctggaccgaggcctggatcccaatttccacgacccggagaccggagagacccccctgaccttagccgctcagctggacgactctgtggaggtcatcaaagctctcaaaaatggtggagctcacctggacttccgtgccaaagatgggatgaccgccctacacaaagctgcccgagcgaggaaccaagttgccctgaagacccttttagagcttggtgcatccccagattataaagacagttacggcctcaccccgctgtatcacacagccatcgtcggaggtgatccctactgctgcgagcttctcctgcacgaacacgccactgtgtgctgcaaagatgagaacggctggcacgagatccaccaggcctgcaggtacgggcacgtgcagcacctggagcacctgctgttctacggggcagacatgagtgcccagaatgcctcggggaacacggccttgcacatctgcgccctctacaaccaggacagctgtgcaagagtgcttctgtttcgaggcggaaataaggagttaaaaaactacaacagccagactccatttcaggtggccataatagcaggcaactttgagctggcagaatacatcaagaaccacaaggaaacagacattgtgcccttccgagaggccccggcgtactccaaccgccggcggcggccccccaacacgctggccgccccccgggtcctgctgcgctccaacagtgacaacaacctcaatgccagcgctcccgactgggccgtctgctccacggccacctcgcaccgcagcctgtcaccccagctgctgcagcagatgcccagcaagcccgagggggccgcgaagaccattgggagctacgtgcccgggccccgcagccggtccccatcgctcaacaggctgggcggcgcaggcgaggacggcaagaggccgcagcctctctggcatgtcgggtcgccttttgctcttggtgccaacaaggactcactctcggccttcgagtacccggggcccaagcggaagctctacagtgccgtgcccgggaggctcttcgtcgctgtcaagccataccaaccccaagtggacggcgagatcccccttcaccgcggtgacagggtcaaagttctgagcatcggtgaagggggcttctgggaaggcagcgcccgcggccacatcggatggtttccggcggagtgcgtggaggaggtccagtgtaagcccagggacagccaggcagaaacccgcgctgaccgcagcaagaagcttttcaggcactacaccgtgggctcctatgacagcttcgacacttccagtgactgcattattgaggagaagacggtggtcctgcagaaaaaagacaatgagggctttggattcgtgcttcgaggggccaaagctgacacacccattgaagaattcacaccaacaccggctttcccagccctacagtacctggagtccgtggatgaaggtggggtggcgtggcaagccggactaaggaccggggacttcttgattgaggttaacaatgagaatgttgtcaaagtcggccacaggcaggtggtgaacatgatccggcagggagggaatcacctggtccttaaggtggtcacggtgaccaggaatctggaccccgacgacaccgccaggaagaaagctcccccgcctccaaagcgggcaccgaccacagccctcaccctgcgctccaagtccatgacctcggagctggaggagctcgtggataaagcctcggtccggaagaagaaggataaacccgaggagatagtcccggcctccaagccctcccgcgctgctgagaacatggctgtggaaccgagggtggcgaccatcaagcagcggcccagcagccggtgcttcccggcgggctcagacatgaactctgtgtacgaacgccaaggaatcgccgtgatgacgcccactgttcctgggagcccaaaagccccgtttctgggcatccctcgaggtacgatgcgaaggcagaaatcaatagacagcagaatctttctatcaggaataacagaggaagagcggcagtttctggctcctccaatgctgaagttcaccagaagcctgtccatgccggacacctctgaggacatcccccctccaccgcagtctgtgcccccgtccccaccaccaccttccccaaccacttacaactgccccaagtccccaactccaagagtctacgggacgattaagcctgcgttcaatcagaattctgccgccaaggtgtcccccgccaccaggtccgacaccgtggccaccatgatgagggagaaggggatgtacttcaggagagagctggaccgctactccttggactctgaagacctctacagtcggaatgccggcccgcaagccaacttccgcaacaagagaggccagatgccagaaaacccatactcagaggtggggaagatcgccagcaaagccgtctacgtccccgccaagcccgccaggcggaaggggatgctggtgaagcagtccaacgtggaggacagccccgagaagacgtgctccatccctatcccgaccatcatcgtgaaggagccgtccaccagcagcagcggcaagagcagccagggcagcagcatggagatcgacccccaggccccggagccaccgagccagctgcggcctgacgaaagcctgaccgtcagcagcccctttgccgccgccatcgccggagccgtccgcgaccgtgagaagcggctggaagccaggaggaactccccggccttcctctccacagacctgggggatgaggatgtgggcctggggccacccgcccccaggacgcggccctccatgttccccgaggagggggattttgctgacgaggacagcgctgagcagctgtcatcccccatgccgagtgccacgcccagggagcccgaaaaccatttcgtgggtggcgccgaggccagtgctccgggtgaggctgggaggccgctgaattccacgtccaaagcccaggggcccgagagcagcccagcagtgccctccgcgagcagcggcacagccggccccgggaattatgtccacccactcacagggcggctgcttgatcccagctccccgctggccctggcactctccgcaagggaccgagccatgaaggagtctcaacagggacccaaaggggaggcccccaaggccgacctcaacaaacctctttacattgataccaaaatgcggcccagcctggatgccggcttccctacggtcaccaggcagaacacccggggacccctgaggcggcaggagacggagaacaagtacgagaccgacctgggccgagaccggaaaggcgatgacaagaagaacatgctgatcgacatcatggacacgtcccagcagaagtcggctggcctgctgatggtgcacaccgtggacgccactaagctggacaacgccctgcaggaagaggacgagaaggcagaggtggagatgaagccagacagctcgccgtccgaggtgccagaaggtgtttccgaaaccgaaggtgctttacagatctccgctgcccccgagcccaccaccgtgcccggcagaaccatcgtcgcggtgggctccatggaagaggcggtgattttgccattccgcatccctcctccccctctggcatccgtggacttggatgaggattttatttttacagagccattgcctcctcccctggaatttgcaaatagttttgatatccccgatgaccgggcagcttctgtcccggctctctcagacttagtgaagcagaagaaaagcgacacccctcagtccccttcgttgaactccagccaaccaaccaactctgcagacagcaagaagccagccagtctttcaaactgtctgcctgcctcattcctgccaccccctgaaagctttgacgccgtcgccgactctgggatcgaggaggtggacagccggagtagcagcgaccaccacctcgagacgaccagcactatctccaccgtgtctagcatctccaccctgtcttccgaaggtggagagaatgtggacacctgcacagtctatgcagatgggcaagcatttatggttgacaaacccccagtacctcctaagccaaaaatgaagcccatcattcacaaaagcaatgcactttatcaagacgcgctcgtggaagaagatgtagatagctttgttatccccccgcccgctcccccgcccccgccgggcagtgcccagcctgggatggccaaggttctccagccaaggacctccaagttgtggggcgacgtcacagagatcaaaagcccgattctctcaggcccaaaggcaaacgttattagtgaattgaactctatcctacagcaaatgaaccgagagaaattggcaaagccgggggaaggactggattcaccaatgggagccaagtccgccagcctcgctccaagaagcccggagatcatgagcaccatctcaggtacacggagcacgacggtcaccttcactgttcgccccggcacctcccagcccatcaccctgcagagccggccccccgactatgaaagcaggacctcaggaacaagacgtgccccaagccctgtggtctcgccaacagagatgaacaaagagaccctgcccgcccccctgtctgctgccaccgcctctccttctcccgctctctcagatgtctttagccttccaagccagcccccttctggggatctatttggcttgaacccagcgggacgcagtaggtcgccatccccctcgatactgcaacagccaatctcaaataagccttttacaactaaacctgtccacctgtggactaaaccagatgtggccgattggctggaaagtctaaacttgggtgaacataaagaggccttcatggacaatgagatcgatggcagtcacttaccaaacctgcagaaggaggacctcatcgatcttggggtaactcgagtcgggcacagaatgaacatagaaagggctttgaaacagctgctggacagataaggacggctgctctccacctcgcagactgctcttgttataagtagagatgggctcgtgctgaaacatctgaatgccaagcgaagtctgtgagcatcaaccccactccatgggtttgtctcctggtacccaaagaaatactgagttgtgtccacaacatggctgggtcttcagacccctggctcaccatgtgggtgtcttgggcagtttctatcacacatgggacaaggggagggagtttttctaacatggaaaaagattcccagcctgccgcccagcatgcaggtggcctcgctttgccgggtccgagaggctccccgtcaattttgcacgggatcctagctcttgtaggcagacaccagtgcactctagatacctcctgagacctccgtcctctgctttccgggcagctctcaccaccccaggccccggcatgaggcctttcctcagtcctgtggcctctcagaggacacctgatgctcacctgcccctctttctcctgcacttggcttgcagtgagatgctcccagatgcatttgtccagtgccccatcatgggcctgaaaggcagagaaactttttcctacacagattcttttccccatctcctcctgtggtttgcatccatggctctttggccatgaggttcctggcagtgctgggagtttggatgggatcgtgcccagctttgcttagctttctttatttctgcaaatctgttagcataattccaaggtggccaagcagatgtcacatggagttagtcaaagcacaaagtcacgattccacaatggaggggagacctggccaagggagccagccagcgtgcaactgcccaagctccaggtctccaggacaagagcagttgtctgccatgagcacccatccaggatggagaataagggcttctctgcctctcagaattctttttaattgaagatgtcttgagctctgcaaagatcagagcaggtgagcatccactttgacatgaaggacaagaagacgcatggctcatggcgggcacatgcggctgccagtgagacagcgtctcctctgggagctgggcgggcacagcatcctcagttctgtgcccagccaagggtgagcatctctgctgagacagtccttttgctctcggaggccagggaagatggtacttagaggcttttcccctatcgctctgggtgtctaggaatcccaccagcttgtcttaacagtacaacagcttctttgaggacccagtgggtatggagtatagacagaacccagggttgagaacagaaggtgggcggcaggatcagagtgaaagcagaggcgtgaggagaggaaagcagggaggtctcctgggctgccaggtcagcctctctggcaaggctttcttgagccccgcccctttctttccccggagtccctccaccccataacaatacctcgaatttccaaaagaggtcaccagatgcacatgggccgcaaaacacacagtcaggcttccagcacattctcccccatttggaggatactcgaatgtcaggtttttggttttattattatttcagaactagctcagcccatctctaattataaaacatggttttgttttttttttttcctttttttcttgattaggtctggaacagctctagaatgaacacataaaatttagcaatttaaaatctttctttactgcaagtttaaatagttgtacagatagtttataagcacaatattttaagaaaaaaaagtggctggtctactaggcagcctttgtgccacttcagtgctagaaagttaaagaaaaaaaaacttttgtgatttaataatactatttctgtggaataattataaaagtatgacctttttaaatcaaccttatttggatgcatctgaaccagcagagctgtgttatattttctatctttgctagaacttcgtcattgaaggacaatttcttcaaagtggttacaattcataatgcagcagtttctccaaaaacaaaaacaaaacacacaccacacacacgcgcttttccagtcacacacccctgatgttggaaccaagtttttggaccttctgttccaaaaccttttgcaggtcaatctttgtatttgaaatgatccaatccaacttgaagtcaattgaatattaaggcgctttacttccgtgtgctttcagtttttccatcatgagatgaatgagcattactctagataaatttcaagacaggatactacaggtggcctgctgaggctgccccatattttagaaaatgtaaaaatggtggtttggccattaatttgtcttccatttgatgataccgcaaaattccgtgagtccattcctttggcatggcactttccctgggcctacagttggtattacctctgtgctcagtgccaggcaaaacactagctcaaaggagagtcaaggaaaccgctggcagacgataaccagtcgaaactcgtgacttcggtttgttgaactttggcagccagttggtgagggccagatgttattccctttcttaaagatactccaagccacatgccactaaccacaagcaagctggctgcaagactaaagagctgataacatagtttatttttacactgtcttattatagagaagtaatagacctatcagaacctgcactgaccaacaaataaacacatgttgccaagatgaatcggtctctatctctatctgcttattttggtactgaaagcaatagttcctcattcaaatcaccacccactgttctccccctttgggacatgttaggacgaggccctattccatgcccctctttaatggtggaacaaatgttaaactgctcatctaaagatcatgttgatattattccaggttttaagatcaacttttgttacatactgtaatttaaataaactgcatttacatgcctagtttctgtaatattgtgtatacaaaacccaaatctctcaaaatgtaaattatgtatacctgccaagataccttttccagggtgtctgcgcacattttaagttaattcacataatataaaaattactcaatgtgactgttgatttgctgaactttacatatcacaaagtgaattatttgtgatactttagttaataaaatggtaaatttttttctcagttattgaacaagcaagcattatccagttgatctggcaatgactttttgtgtgtgggccacaatattgattttcccattaacaatttttttttgttttttaaatactaatatgtttcacactatagtttgtgtaacaacacgtgttcgcattatctatgttgctgttacttttgtgcttttattctttttagactttataaaaaaaaaaaaaagctcctgtaatttgcactttctcccaatccttaaatctcttgtatggcaaccaaaattactgtaaaaaaataaatatactattgcactaaggttgtggttctgattgcaaacaaacagtgaacactgtctgaattaaacaaaaagctgcccgacttgcaatctaatgtagattatctcaggcattgtggccagctctgcctctctaaaactgaccagaaaaatctctctcatcgagtaaacaggctcctgtcactgagctaatctgccttggttccatttccttattctcaatttatcaatggatacgtgcatgttatttcagaattatgcaaaacgtcaaaatctgcttctgtgaccgctgctataggcgtggagctgaggctcggcttttccttttgttctgggtggaagcagcggtgccgcggagggccagccagatccggacccttcccttagggtccagtctccccacaccccagcagggtgtcttctagccataaggccaagggagtggcagaactgggccgcctctctggttgacaagcaaaccacatgctaaggcttggagcaagagagaatttgtgtctattggcaaagaactaagccaggaagacatgggccatccctccgctttagggaagcatattttaaacctaaacgttgaacttcttctttggcctcaccagtgaaaacttgttgtctttagttcctaaagtttcttctactttggcacattccccagttgagcagcagcctctatgcttccacgttcaggaaaaattccagtcctcatatcttttgtagttcaccctcaagctctcccgcttcaccatccaatagtttctcccaaaccttggcacccccctagactttgcttccaatggtttcttccagaccacttttcctagatgaatatattcgtttaccttactaggaaaattattggaagattttttcttttacttgaaattggaggcattttaataactggcgaactggaatgtgtttctgtatttgtagacaaccatgaacccatgcaagtaggtgaacattccacagtggctgggtgaccacagcagctgcatgcagacaggactgcccgtgctttgtggggaatcagagaatttccaaacttgtttctcagacttccgcagatctcatcactttgatttctaatccatgctgtattggtgattttgtttatcgttcctgtaacttgttctacattccacagtctttaccgttttatgttcaaaattacaacaatccctgtccattgattccactctggaactctttgttcatgccaattttgaaattttaatacgagccttcaaataaacacagaaaagaaaaaaaaaaaggaaaaaaaataaagtgtgtgccttgggtgttttgaacctgatctgcataaaaccatattgtattcaaatgctgtatctttcatgaaaggataaatatatcttcaatgtattaatgtagctgataaaatagttatagtgccttgttttctgaactgagaagcccatatcaatgcacaacgtaaagaaaggacggttcgagctatgaaatgttgaggacacctacacgtgattctggagcctttctcatcataagactgtggaaaatacacagtcgtttaagttaaaaataaaaagtaaattga

SEQ ID NO: 178 - DNA, 3785 bp, Artificial Sequence
  GATA6
agttccgacccacagcctggcacccttcggcgagcgctgtttgtttagggctcggtgagtccaatcaggagcccaggctgcagttttccggcagagcagtaagaggcgcctcctctctcctttttattcaccagcagcgcggcgcagaccccggactcgcgctcgcccgctggcgccctcggcttctctccgcgcctgggagcaccctccgccgcggccgttctccatgcgcagcgcccgcccgaggagctagacgtcagcttggagcggcgccggaccgtggatggccttgactgacggcggctggtgcttgccgaagcgcttcggggccgcgggtgcggacgccagcgactccagagcctttccagcgcgggagccctccacgccgccttcccccatctcttcctcgtcctcctcctgctcccggggcggagagcggggccccggcggcgccagcaactgcgggacgcctcagctcgacacggaggcggcggccggacccccggcccgctcgctgctgctcagttcctacgcttcgcatcccttcggggctccccacggaccttcggcgcctggggtcgcgggccccgggggcaacctgtcgagctgggaggacttgctgctgttcactgacctcgaccaagccgcgaccgccagcaagctgctgtggtccagccgcggcgccaagctgagccccttcgcacccgagcagccggaggagatgtaccagaccctcgccgctctctccagccagggtccggccgcctacgacggcgcgcccggcggcttcgtgcactctgcggccgcggcggcagcagccgcggcggcggccagctccccggtctacgtgcccaccacccgcgtgggttccatgctgcccggcctaccgtaccacctgcaggggtcgggcagtgggccagccaaccacgcgggcggcgcgggcgcgcaccccggctggcctcaggcctcggccgacagccctccatacggcagcggaggcggcgcggctggcggcggggccgcggggcctggcggcgctggctcagccgcggcgcacgtctcggcgcgcttcccctactctcccagcccgcccatggccaacggcgccgcgcgggagccgggaggctacgcggcggcgggcagtgggggcgcgggaggcgtgagcggcggcggcagtagcctggcggccatgggcggccgcgagccccagtacagctcgctgtcggccgcgcggccgctgaacgggacgtaccaccaccaccaccaccaccaccaccaccatccgagcccctactcgccctacgtgggggcgccactgacgcctgcctggcccgccggacccttcgagaccccggtgctgcacagcctgcagagccgcgccggagccccgctcccggtgccccggggtcccagtgcagacctgctggaggacctgtccgagagccgcgagtgcgtgaactgcggctccatccagacgccgctgtggcggcgggacggcaccggccactacctgtgcaacgcctgcgggctctacagcaagatgaacggcctcagccggcccctcatcaagccgcagaagcgcgtgccttcatcacggcggcttggattgtcctgtgccaactgtcacaccacaactaccaccttatggcgcagaaacgccgagggtgaacccgtgtgcaatgcttgtggactctacatgaaactccatggggtgcccagaccacttgctatgaaaaaagagggaattcaaaccaggaaacgaaaacctaagaacataaataaatcaaagacttgctctggtaatagcaataattccattcccatgactccaacttccacctcttctaactcagatgattgcagcaaaaatacttcccccacaacacaacctacagcctcaggggcgggtgccccggtgatgactggtgcgggagagagcaccaatcccgagaacagcgagctcaagtattcgggtcaagatgggctctacataggcgtcagtctcgcctcgccggccgaagtcacgtcctccgtgcgaccggattcctggtgcgccctggccctggcctgagcccacgccgccaggaggcagggagggctccgccgcgggcctcactccactcgtgtctgcttttgtgcagcggtccagacagtggcgactgcgctgacagaacgtgattctcgtgcctttattttgaaagagatgtttttcccaagaggcttgctgaaagagtgagagaagatggaagggaagggccagtgcaactgggcgcttgggccactccagccagcccgcctccggggcggaccctgctccacttccagaagccaggactaggacctgggccttgcctgctatggaatattgagagagattttttaaaaaagattttgcattttgtccaaaatcatgtgcttcttctgatcaattttggttgttccagaatttcttcataccttttccacatccagatttcatgtgcgttcatggagaagatcacttgaggccatttggtacacatctctggaggctgagtcggttcatgaggtctcttatcaaaaatattactcagtttgcaagactgcattgtaactttaacatacactgtgactgacgtttctcaaagttcatattgtgtggctgatctgaagtcagtcggaatttgtaaacagggtagcaaacaagatatttttcttccatgtatacaataatttttttaaaaagtgcaatttgcgttgcagcaatcagtgttaaatcatttgcataagatttaacagcattttttataatgaatgtaaacattttaacttaatggtacttaaaataatttaaaagaaaaatgttaacttagacattcttatgcttcttttacaactacatcccattttatatttccaattgttaaagaaaaatatttcaagaacaaatcttctctcaggaaaattgcctttctctatttgttaagaatttttatacaagaacaccaatataccccctttattttactgtggaatatgtgctggaaaaattgcaacaacactttactacctaacggatagcatttgtaaatactctaggtatctgtaaacactctgatgaagtctgtatagtgtgactaacccacaggcaggttggtttacattaatttttttttttgaatgggatgtcctatggaaacctatttcaccagagttttaaaaataaaaagggtattgttttgtcttctgtacagtgagttccttcccttttcaaagctttctttttatgctgtatgtgactatagatattcatataaaacaagtgcacgtgaagtttgcaaaatgctttaaggccttcctttcaaagcatagtccttttggagccgttttgtaccttttataccttggcttatttgaagttgacacatggggttagttactactctccatgtgcattggggacagtttttataagtgggaaggactcagtattattatatttgagatgataagcattttgtttgggaacaatgcttaaaaatattccagaaagttcagattttttttctttgtgaatgaaatatattctggcccacgaacagggcgatttcctttcagttttttccttttgcaacgtgccttgaagtctcaaagctcacctgaggttgcagacgttacccccaacagaagataggtagaaatgattccagtggcctctttgtattttcttcattgttgagtagatttcaggaaatcaggaggtgtttcacaatacagaatgatggcctttaactgtgaaaaaaaaa

SEQ ID NO: 179 - DNA, 5416 bp, Artificial Sequence
  HS3ST3B1
actccacctcggtccacagctctcttcctgcgcagttcgcctctgcagcctctgcggggaagtgccggggctgctcgaggctcagttcttaggactgcaaggaggcagccccggcgtgcggcggtgcgcacagtctagagtggccagggcgcgagagtgcaacgtcctcctggccccgagcgcgtcgtcgcgccccgggagcagaccctcgcccagcagttaccgccgtcccgactttccgttccagttgcagctcctgccgggcaacatgtcaagagccgccgccgctacagctgccgccgccacctggggaagagcagcagcagcagcggcggccgcgggcacacgggggcaataaaccgagccacccgggcgtccagcgtgccggggaaccctctctgcgctcactgcccggcgggacccacgccatgtgctgagccatgtccctggccgcgcccgcgggcagcgcatggggcagcgcctgagtggcggcagatcttgcctcgatgtccccggccggctcctaccgcagccgccgccgcccccgccgccggtgaggaggaagctcgcgctgctcttcgccatgctctgcgtctggctctatatgttcctgtactcgtgcgccggctcctgcgccgccgcgccggggctgctgctcctgggctctgggtcccgcgccgcacacgacccgccagccctggccacagctccggacgggacgccccccaggctgccgttccgggcgccgccagccaccccactggcttcaggcaaggagatggccgagggcgctgcgagcccggaggagcagagtcccgaggtgccggactccccaagccccatctccagctttttcagtgggtctgggagcaagcagctgccgcaggccatcatcatcggcgtgaagaagggcggcacgcgggcgctgctggagtttctgcgcgtgcaccccgacgtgcgcgccgtgggcgccgagccccatttcttcgatcgcagctacgacaagggcctcgcttggtaccgggacctgatgcccagaaccctggacgggcagatcaccatggagaagacgcccagttacttcgtcacgcgggaggcccctgcgcgcatctcggccatgtccaaggacaccaagctcatcgtggtggtgcgggacccggtgaccagggccatctcggactacacgcagacgctgtccaagcggcccgacatccccaccttcgagagcttgacgttcaaaaacaggacagcgggcctcatcgacacgtcgtggagcgccatccagatcggcatctacgccaagcacctggagcactggctgcgccacttccccatccgccagatgctcttcgtgagcggcgagcggctcatcagcgacccggccggggagctgggccgcgtgcaagacttcctgggcctcaagaggatcatcacggacaagcacttctacttcaacaagaccaagggcttcccctgcctgaagaaggcggagggcagcagccggccccattgcctgggcaagaccaagggcaggacccatcctgagatcgaccgcgaggtggtgcgcaggctgcgcgagttctaccggcctttcaacctcaagttctaccagatgaccgggcacgactttggctgggattgagcagacccgggctatgtaccttacccacgtggcttatctattgacagagattatatgtatgtaaaatgtacagaaatctattttataataatttatttttaattcataagcaattaattcactaagctgcctagccacactctttagagagttagcttcataatctgttaacattccaaagtgtttaactctagtatttcgttctcttcttcacaattgatggtgcttctattttttcttctcccctacctgttatatttaaaacaaagaaaagcacaacttgagatttttgttgttacgggtattcagccttcagtcaccgtctgagttctccagttgctgcctccttgtcttgtcttgggtctcccattccagcttccctgtctcttcctgcctgtgtacctcgtaggaacgctgagctgcctcaacagggctgtattctgaagggcaggcctcatgcagcagcctccttgcagatgtggtgtcccgtccaatgatgtagcctgaaagccacagccctagggttctgtccctccctccattcagcacatggggaaatttctcactccctttacagggacatccacatcctttttttttcttttttttttttttttttttttgagatggagtcttgctcttgttgcccaggctggggcgtaatggtgtgatatatgcttaccacaacctctggctcccggttcaagcgattctcctgtctcagcctcccaagtatctgggattacaggcatgcaccaccatgcctggctaattttgtatttttagtagagacggggtttcttcatgttggtcaggctggtatcaaactcccgacctcaggtgatccgcctgccttggcctccaaagtgttgggattataggcgtgagccactgcgcccgctatccacatccttctagagtcagaatggtagggtctgttgacttcagcttttgattttgcaggatggccctgtgtcctcctctgccccattccctggttcattaaccagtttgaagtgtatgtagattgttgccccgtctttcccaggtcacatgtgtgagatgcctgggtgctgcttcagaaatcaagatgatctcctttaatttgcatgaaactacaccatgctgcgttccccaggcagacagttctgctttgacacaccaaagaatcccgtaggctagcagagccaccagcacaaaccaagggcgctgggtgtcgagactcagaggggtcagctgtgtccctcggcatcagcgtctaccaaggtgctgctaggtacagagccagccagtgttgggcagcaggctcacagcctcaatagggagaaaagacaaaggcctcaaaatgacaggcagcctgacagaggaaggagtctgacacctcagcttgatgcgtctttggaattcctagctcatctcagaattatatcttagagtgataatatgggtggtagccagtggccaaacagcaagaactaagagtggcccttgcaaaaaaaggttgggaaagctgggcccatattgcctgtaaacccttgagcctgatgctcatacagctgtcccttgttttagccaggtcttgacagaagggttaccagcactgtcactgctctacagaatgctctccccgtgcctctctgttgatttataacagttgggtaaccagatagcaatatagtggcaattgagtagccatatagtaatacaggggcagttggttaaacatatagcaatatcacataatgatatgtttaatttaacctcagttttttaaaccagaatgcttctaccataaaagaattgtgatttcagttatacttccatcaaggaatatgtgggaagatatacatattgtcaaaatggttgggatgggatagttacaaaggacacttttgtatgttgtatgggatcacttgcctgatagtataaggaacattgtatgaaaagatgaaaagatacttcatttttagaaactgatcagagatgtcactggtctttaagtgatgtcttgaaaatccagtatgtatttgcccaaaagttttagcctacatctagctagcttacacttagcagccaaaccatcattgtgtaggttctgttttggaggaagctcatgggggatctgtgtatttcttaggtttctccctgttctccaatgttttatccatttcgtagcttttttactgtctccagaaagtagtgtgggacctgcacttaggggaataccagaatcatagcgtggttctgccttcttgatgagtgattgtgaaaaacacctgcataagggtgctaattggttgtgtattttttcatttatttgaaatcaaactgagaacacctcttttcggtttacagcataacatggcttgaagtaaaaggcagtatccaagtccttcacctggtcttgccctgtctactttctgatcattctgatggtctgatgtggctgttgatgtggaactgcagaagagttcagagaagagtatgcaacaaagccataggaaaacacacaggagcttttccctccccttcaggtccccgccctctttccaagctggacaattttttattaagttgtttattccctgccttaaaactgaaacaggaaattttctggtagaaggagggtcatttagtcacgaacactgaagtgggtcaaaattctattctgggtcaaatccttgaattcaaacagatgtccataatcagtactgatggaatagagcaagtttttctatgtaagacaaataaatcaaacatcatgtgcatctcctcataagggtctgcaagggtctgatggtttaaagttcctaacagatctggttgcagcatctgccggagcttgcaccccatcatcggacggtcatcttcctgctgcagaagttaggtaacataagacttagatttcttcctgttctagcaatctgcaagaccaccaggcttaactttttagctgccagaagacaaacccccttttctgtttcggcaatttgtcctggcacgtgttttggacttcctccgatttacacgaaaagctctgatattcattggagtactttattttttttcctcagttttgtttcttttctcatgtaaaaacaaacaaaaaggtcaacaaaaaaaaattgaggtttttcttgtttctatctagttcatgctttctttgcggtgtttgaacagtagtctgttaacttagtaggtggtacctggaaaggtattttaagtatagtgactgtttaataaatacttaattggatgatggaggaggagaaattgttttcttcccaggattctctttgggggtcattttgtgtgacagatatattttagacatttggagaaacagtttcagatcctgccaggatatttttgtaaaaaaggaaaatggaagattccaataaactagaaacagtacgtatctaagatgctgacacagaagctaatgtgacttttcagcttatcaagaggatggccaataaaacttaaaggtgtggttagatgttttctcacttttgtgacattaatttatcactgagtctcattcaaccaagtaatctaaaatactgtgcaaattctagcagtatgtcttcgataacttggatgttaggatagccaatatgtacaaaaaattaaatcaagtattttgtcctatgtataacacaaattaattttacacagagaaagatgtttctaggcaagtgaaattctggtaattcatactatttctttgtatgaacaaataaaatatattttgccaaaaaaaaaaaaaaaaaa

SEQ ID NO: 180 - DNA, 2551 bp, Artificial Sequence
  CALB1
gtagggagagaactctggaggaacgctgagctgagcagcaccgaggacagcgcccggcagcgcccgcgcccaggtctccctccgcagccctgactcgcgcacacgctgagcttttgctcactccccctcgcgcggacacagacacacgcatattcacacacccagacacacaccccgctgtacaatggcagaatcccacctgcagtcatccctcatcacagcctcacagtttttcgagatctggctccatttcgacgctgacggaagtggttacctggaaggaaaggagctgcagaacttgatccaggagctccagcaggcgcgaaagaaggctggattggagttatcacctgaaatgaaaacttttgtggatcagtatgggcaaagagatgatggaaaaataggaattgtagagttggctcacgtattacccacagaagagaatttcctgctgctcttccgatgccagcagctgaagtcctgtgaggaattcatgaagacatggagaaaatatgatactgaccacagtggcttcatagaaactgaggagcttaagaactttctaaaggacctgctagaaaaagcaaacaagactgttgatgacacaaaattagccgagtatacagacctaatgctgaaactatttgattcaaataatgatgggaagctggaattaactgagatggccaggttactaccagtgcaggagaattttcttcttaaattccagggaatcaaaatgtgtgggaaagagttcaataaggcttttgagctgtatgatcaggacggcaatggatacatagatgaaaatgaactggatgctttactgaaggatctgtgcgagaagaataaacaggatctggatattaataatattacaacatacaagaagaacataatggctttgtcggatggagggaagctgtaccgaacggatcttgctcttattctctgtgctggggataactagagttggtggccgcaaccacttgctagtgatacactgtatctaaaaaataactgtgcactataagggagtaggctgtattttcttttatatctgtaaatttaactgcatatagataattatccaggatgtgtggctcattcttttcagcttgtttctatactgtttgtaatatacagtttttgtaaccatatgattgaaaagaagaaagtctatgcttaggccagtcagtacacccaattttaaaaaataacatattcttgctttcacaaatatagttgaacaagatttccctaaaaattccaccaggattaatctctaaaattctagtctctgatttgcaaatgcacatttgtcactgaataatggaattatgtataacaagccaaacattcttattttagacaaccatagaactgtcccacaaaatatttctaagcttatttctaactattaggaggaatgtgcttttccatctaaaatactcaccaaaatatagttaattgtggctttatgaagttaacagtctcattacagatttagtttaccaatcaacagcatgtctactgcttggatccatacaaaactatcggttcaagttgatgtgacaagggaagggagcaccagatgacacataaatctgtctgattctatgcctgtatttccaacaaacttactgtcagagaatatgacctaaatccattttctaaactgttttcatgtgttgcaaattattctagtcaactgctgttttatgtcatactctgtgtaatctctgattaaatttaatatactgcatatcctggtgtctagtttgcatacttcctggattttctttctatgtagaactgttcatttccaccaagggtatctgctgcctctgaaaatatttttttctagctataacaactctattttttactacataattaaattttaatgtaaaattcatagcatcctgattattgaatgttatatcatcaatacttttgtgtattctgtggattctatatttcatattgagatcagcattcaaaatagttctatttctatctgcaaatagtttcaaatgagtttaaaaaaataacatctgaaaagaaatgctaatgtaatcatttatcttatctagcaagaagattctaaaacattctttaacatacatctaagtcagtttcacatatttgtagctagaatatcctatactggttatagttgatatgtaacagttggtgattttagatttctttgattgtgaaacagggagctatgagagatgtgtccatgtgaaatttacagttactgcctaggagttaatgatcgttctgggtcagcttgaatgtccccattctataaattcaacacttattttctgaattcataaaaataaccaaaaaatgtgagctataatgtttccctcaagaacaaacagaaacgagatttgccaaaaactaaaattcaacaaatgatgttgagtgggagattggctttgcctttagcgtgtaaatggaagcactgccattagactgaatttaactactaagaataaataaagaagaaaataaccttaaaaaaaaaaaaaaaaaa

SEQ ID NO: 181 - DNA, 4525 bp, Artificial Sequence
  POU3F3
tttgggaaagtgtggtggtgggtgcgcgctcgcggcggagggtaaacattcgacagtccccgctctgagagggagggacagagagcgaactgtcagatcggagcgagagcgggcgcccgagagagggagagagagagagggagggagaggaaaagtgagagagggaaagagagcgcgaacgagggcgcagagcgagctcctgctgcaactctgctccagcacggccagcgccagcgcccgccgtcggtgcactctacgagccgtgcagcgtgcccactggagttgttgtgtatcaaggatcgatcccctatatgcacacacacacctccacctccaccaatgcactcttcttcctcctccttctccagacaactgctgggaaaaaaataaaacaccaaccccaaccgtcagcaacaaggtaacagagcgattcgacatcattttttttcctgttcaattttttccttgttatatttgtttcctaatttctgcccaaaaggaaagatgtcgcatcagactgtgactgttgcgaggagaatgaaaaaggactcttgtttcagaggcaaccaagagctccggcaatagcaacttcagagaaatgcaccatcgcaagaagttttcctaggacagaacaaaacttgaaacgagaggaccagagggggagagcaggagccagcctcccctctccgcactcgcgagcagccagcagcaccacgccttcaaggacgaaaaagttttactactctaagggaaaacgagtgaaatgtgttcctgaggaggagaggagaggagaggagagagcggacaagagaaggagcgggccggttgctggtcatccgtaatttggctaaggaagaaaggagcagcttctttctttgttatctcccgtgaaaccttcacttagcaggtggacggagccccgcgaccgggcagagtccgggctcgcccgaggacaggaggaggagcgggagcccgcgcgtcccgggagagcgccccgagtgcaggtccccgccccgcccggcgagccccgctggagcgagcccagcgcgccggggctggggggcggccacgaccccccctgaagggggtggccacggagcgcaccccgagaagcgagcccccctccccagagcgctgctcctgcggctgctgctgctgctggtgaccaaggccggccggcgacccccgcgccctgccgagcggccttgcagctgcagccgggggccgcggcggcggcggcggcggcgggggcggaggcggcggcggaggaggaggcggcgaaggcggcggggccggcgggggcccggggcgggggcggggaaggagggggggaggaggcgggaggcggggggcgcggcggcggcggcggcggcggcggccgcggctgctgctgcggcggcggcggcggtggtggcggcggtggggtggcgggagcggagcggcatggccacggcggcttctaacccctacctgccggggaacagcctgctcgcggccggctctattgtgcactcggacgcggcaggggctggcggcggcgggggtggcggcggcggcggcggcgggggcggcgcagggggcgggggcggcggcatgcagccgggcagcgccgccgtgacctcgggcgcctaccggggggacccgtcctctgtcaagatggtccagagcgacttcatgcagggggccatggccgccagcaacggcggccatatgctgagccacgcgcaccagtgggtcacagccctgccccacgccgccgccgccgccgccgctgccgccgccgccgccgtggaggcgagctcgccgtggtcgggcagcgccgtgggcatggctggcagcccccagcagccaccgcagccgccgccgccaccgccgcagggccccgacgtgaagggcggcgccgggcgcgacgacctgcacgcgggcacagcgctgcaccaccgcgggccgccgcacctcggacccccgccgccgcccccacaccagggccaccctgggggctggggggcggccgccgctgccgcagccgcagccgccgccgccgccgccgccgcgcacctcccgtccatggccgggggccagcagccgccgccgcagagtctgctctactcgcagcccggaggcttcacggtgaacggcatgctgagcgcgccaccggggcccggcggcggcggcggcggcgcgggcggtggagcccagagcttggtgcacccggggctggtgcgcggggacacgccagagctggccgagcaccaccaccaccaccaccaccacgcgcatcctcacccgccgcacccgcaccacgcgcagggacccccgcaccacggcggcggcggcggcggcgcggggcctggactcaacagccacgacccgcactcggacgaggacacgccgacgtcggacgacctggagcagttcgccaagcagttcaagcagcggcgcatcaagctgggcttcacgcaggccgacgtggggttggcgctgggcacactctacggcaacgtgttctcgcagaccaccatctgccgcttcgaggccctgcagctgagcttcaagaacatgtgcaagctcaagccgctgctgaacaagtggctggaggaggcggactcaagcaccggcagccccacaagcatcgacaagatcgcggcgcagggccgcaagcgcaagaagcggacctctatcgaggtgagcgtcaagggcgcgctggagagccacttcctcaagtgccccaagccctccgcgcaggagatcaccaacctggccgacagcctgcagctcgagaaggaggtggtgcgggtctggttctgcaatcggcgccaaaaggagaagcgcatgacgccgcccgggatccaacagcagacgcccgacgacgtctactcgcaggtgggcaccgtgagcgccgacacgccgccgcctcaccacgggctgcagacgagcgttcagtgaagccagggcgcagagcgaagagggccgccgccgccgccgcctccgcagccgccgtcagcaccgccgccgcccctgccgccgccgccgccgccgccgccgccgctgccgccgccgcgccgaccctgcacctgggccgctccgggctccagcccaggcccatccgccgccctcccctccacccagagacaggcatgcccgcccttggaggagaaaacgcgggagaaacggaccaaggaggcatttttgcagtccaaggaaggaggggccaaaaaataaaaagcataataaacacccagactgttttgtatacatatataacaaacaaaaccggaagagaaaaagggggcgatcatgagatctcgttcatactgtggtggtgtttcgtttttgtttttgtttttaaagaagggtgaagatgcctgacgcacgaaaactgcactcgtgaggtttttccaccctgagatgacctacacggcagcggtggacagcacctgcctcgtcttctcctctttgaaaaaaagagagagagagagtcccctttcctttcactttctccctccaaaacagctgcctaaagagatccacggaaactttatttcctgggagcgacctgagagaaaacagaggcaccaggttccatcaggggacgacaccgtgctctgggaccctgtttttcttggccatattaaagtcatttggaaacaaatcaactctgaaatgggaaggaggggggaaaaacagtctccaagaaaaaaataattatattgacagcttctgaaactaacagactgaatagcaaagccaaaagaaaagtatcctcaaagtaaccttggaaataaaaggatcgggaaggagcagagggagagggggaacgtccgctgaggagtggcgagaggccccggccgagtcgggtcgcgggcgggcgggcgaactgggagcagagcgggggcccagccagcgaggccgccgagccaggcccggccgcgtacccaggctttgacggctgccattcagggtggacgatgcctaaagattccaccgctaatattttttttattaatattttttattttttatttctggactgactcagataaaggaatttagaaagactgagcaccagccgctgcacttctctggacttctctcctcaatccgttgccaactttgattgaatgggtgctgtggatgtgattatataatactgccatttccaagcagtgtttttggtaggttttaataaacagacttttcaaaagacggcaatatagaattgttagatccgttgttgatctaaaaatatttgctttatattttcattaaatgacttcttttaatattttattcagaatacttatgaactgctgcaaaacggtaatttatttttccccagatcttgtattacgtgtttttttcagacgagcacaaatcaaaatgaaatgaaaatatggacagttgttaggtaataagggtatcttttgatgtgatcatttgattgtaatttaatttgagtagtgattccgtaagagctgatcgagaaaataaatttgttagaatgaaaaaaaaaaaaaaaaaaaaa

SEQ ID NO: 182 - DNA, 4845 bp, Artificial Sequence
  CDH1
tcagtggcgtcggaactgcaaagcacctgtgagcttgcggaagtcagttcagactccagcccgctccagcccggcccgacccgaccgcacccggcgcctgccctcgctcggcgtccccggccagccatgggcccttggagccgcagcctctcggcgctgctgctgctgctgcaggtctcctcttggctctgccaggagccggagccctgccaccctggctttgacgccgagagctacacgttcacggtgccccggcgccacctggagagaggccgcgtcctgggcagagtgaattttgaagattgcaccggtcgacaaaggacagcctatttttccctcgacacccgattcaaagtgggcacagatggtgtgattacagtcaaaaggcctctacggtttcataacccacagatccatttcttggtctacgcctgggactccacctacagaaagttttccaccaaagtcacgctgaatacagtggggcaccaccaccgccccccgccccatcaggcctccgtttctggaatccaagcagaattgctcacatttcccaactcctctcctggcctcagaagacagaagagagactgggttattcctcccatcagctgcccagaaaatgaaaaaggcccatttcctaaaaacctggttcagatcaaatccaacaaagacaaagaaggcaaggttttctacagcatcactggccaaggagctgacacaccccctgttggtgtctttattattgaaagagaaacaggatggctgaaggtgacagagcctctggatagagaacgcattgccacatacactctcttctctcacgctgtgtcatccaacgggaatgcagttgaggatccaatggagattttgatcacggtaaccgatcagaatgacaacaagcccgaattcacccaggaggtctttaaggggtctgtcatggaaggtgctcttccaggaacctctgtgatggaggtcacagccacagacgcggacgatgatgtgaacacctacaatgccgccatcgcttacaccatcctcagccaagatcctgagctccctgacaaaaatatgttcaccattaacaggaacacaggagtcatcagtgtggtcaccactgggctggaccgagagagtttccctacgtataccctggtggttcaagctgctgaccttcaaggtgaggggttaagcacaacagcaacagctgtgatcacagtcactgacaccaacgataatcctccgatcttcaatcccaccacgtacaagggtcaggtgcctgagaacgaggctaacgtcgtaatcaccacactgaaagtgactgatgctgatgcccccaataccccagcgtgggaggctgtatacaccatattgaatgatgatggtggacaatttgtcgtcaccacaaatccagtgaacaacgatggcattttgaaaacagcaaagggcttggattttgaggccaagcagcagtacattctacacgtagcagtgacgaatgtggtaccttttgaggtctctctcaccacctccacagccaccgtcaccgtggatgtgctggatgtgaatgaagcccccatctttgtgcctcctgaaaagagagtggaagtgtccgaggactttggcgtgggccaggaaatcacatcctacactgcccaggagccagacacatttatggaacagaaaataacatatcggatttggagagacactgccaactggctggagattaatccggacactggtgccatttccactcgggctgagctggacagggaggattttgagcacgtgaagaacagcacgtacacagccctaatcatagctacagacaatggttctccagttgctactggaacagggacacttctgctgatcctgtctgatgtgaatgacaacgcccccataccagaacctcgaactatattcttctgtgagaggaatccaaagcctcaggtcataaacatcattgatgcagaccttcctcccaatacatctcccttcacagcagaactaacacacggggcgagtgccaactggaccattcagtacaacgacccaacccaagaatctatcattttgaagccaaagatggccttagaggtgggtgactacaaaatcaatctcaagctcatggataaccagaataaagaccaagtgaccaccttagaggtcagcgtgtgtgactgtgaaggggccgctggcgtctgtaggaaggcacagcctgtcgaagcaggattgcaaattcctgccattctggggattcttggaggaattcttgctttgctaattctgattctgctgctcttgctgtttcttcggaggagagcggtggtcaaagagcccttactgcccccagaggatgacacccgggacaacgtttattactatgatgaagaaggaggcggagaagaggaccaggactttgacttgagccagctgcacaggggcctggacgctcggcctgaagtgactcgtaacgacgttgcaccaaccctcatgagtgtcccccggtatcttccccgccctgccaatcccgatgaaattggaaattttattgatgaaaatctgaaagcggctgatactgaccccacagccccgccttatgattctctgctcgtgtttgactatgaaggaagcggttccgaagctgctagtctgagctccctgaactcctcagagtcagacaaagaccaggactatgactacttgaacgaatggggcaatcgcttcaagaagctggctgacatgtacggaggcggcgaggacgactaggggactcgagagaggcgggccccagacccatgtgctgggaaatgcagaaatcacgttgctggtggtttttcagctcccttcccttgagatgagtttctggggaaaaaaaagagactggttagtgatgcagttagtatagctttatactctctccactttatagctctaataagtttgtgttagaaaagtttcgacttatttcttaaagcttttttttttttcccatcactctttacatggtggtgatgtccaaaagatacccaaattttaatattccagaagaacaactttagcatcagaaggttcacccagcaccttgcagattttcttaaggaattttgtctcacttttaaaaagaaggggagaagtcagctactctagttctgttgttttgtgtatataattttttaaaaaaaatttgtgtgcttctgctcattactacactggtgtgtccctctgccttttttttttttttaagacagggtctcattctatcggccaggctggagtgcagtggtgcaatcacagctcactgcagccttgtcctcccaggctcaagctatccttgcacctcagcctcccaagtagctgggaccacaggcatgcaccactacgcatgactaattttttaaatatttgagacggggtctccctgtgttacccaggctggtctcaaactcctgggctcaagtgatcctcccatcttggcctcccagagtattgggattacagacatgagccactgcacctgcccagctccccaactccctgccattttttaagagacagtttcgctccatcgcccaggcctgggatgcagtgatgtgatcatagctcactgtaacctcaaactctggggctcaagcagttctcccaccagcctcctttttatttttttgtacagatggggtcttgctatgttgcccaagctggtcttaaactcctggcctcaagcaatccttctgccttggccccccaaagtgctgggattgtgggcatgagctgctgtgcccagcctccatgttttaatatcaactctcactcctgaattcagttgctttgcccaagataggagttctctgatgcagaaattattgggctcttttagggtaagaagtttgtgtctttgtctggccacatcttgactaggtattgtctactctgaagacctttaatggcttccctctttcatctcctgagtatgtaacttgcaatgggcagctatccagtgacttgttctgagtaagtgtgttcattaatgtttatttagctctgaagcaagagtgatatactccaggacttagaatagtgcctaaagtgctgcagccaaagacagagcggaactatgaaaagtgggcttggagatggcaggagagcttgtcattgagcctggcaatttagcaaactgatgctgaggatgattgaggtgggtctacctcatctctgaaaattctggaaggaatggaggagtctcaacatgtgtttctgacacaagatccgtggtttgtactcaaagcccagaatccccaagtgcctgcttttgatgatgtctacagaaaatgctggctgagctgaacacatttgcccaattccaggtgtgcacagaaaaccgagaatattcaaaattccaaatttttttcttaggagcaagaagaaaatgtggccctaaagggggttagttgaggggtagggggtagtgaggatcttgatttggatctctttttatttaaatgtgaatttcaacttttgacaatcaaagaaaagacttttgttgaaatagctttactgtttctcaagtgttttggagaaaaaaatcaaccctgcaatcactttttggaattgtcttgatttttcggcagttcaagctatatcgaatatagttctgtgtagagaatgtcactgtagttttgagtgtatacatgtgtgggtgctgataattgtgtattttctttgggggtggaaaaggaaaacaattcaagctgagaaaagtattctcaaagatgcatttttataaattttattaaacaattttgttaaaccattaaaaaaaaaaaaaaaaaaaaaaaaaaa

SEQ ID NO: 183 - DNA, 3536 bp, Artificial Sequence
  OGN
actgcatttcaccctagagaaagaatgctggcaaagatctctaccacatggaaactgttcttaaagctgctgggccctgaaattttactcagcagtttgaaatcaagacatagcttttctcattcaccctcccacttggggctaatgcacagacatgaacatctattgaggaaaaccacaaaaaacttcaaaacagctacaacgggaaaaagagagttttgtcccacagtcagcaggccactagtttattaacttccagtcaccttgatttttgctaaaatgaagactctgcagtctacacttctcctgttactgcttgtgcctctgataaagccagcaccaccaacccagcaggactcacgcattatctatgattatggaacagataattttgaagaatccatatttagccaagattatgaggataaatacctggatggaaaaaatattaaggaaaaagaaactgtgataatacccaatgagaaaagtcttcaattacaaaaagatgaggcaataacaccattacctcccaagaaagaaaatgatgaaatgcccacgtgtctgctgtgtgtttgtttaagtggctctgtatactgtgaagaagttgacattgatgctgtaccacccttaccaaaggaatcagcctatctttacgcacgattcaacaaaattaaaaagctgactgccaaagattttgcagacatacctaacttaagaagactcgattttacaggaaatttgatagaagatatagaagatggtactttttcaaaactttctctgttagaagaactttcacttgctgaaaatcaactactaaaacttccagttcttcctcccaagctcactttatttaatgcaaaatacaacaaaatcaagagtaggggaatcaaagcaaatgcattcaaaaaactgaataacctcaccttcctctacttggaccataatgccctggaatccgtgcctcttaatttaccagaaagtctacgtgtaattcatcttcagttcaacaacatagcttcaattacagatgacacattctgcaaggctaatgacaccagttacatccgggaccgcattgaagagatacgcctggagggcaatccaatcgtcctgggaaagcatccaaacagttttatttgcttaaaaagattaccgatagggtcatacttttaacctctattggtacaacatataaatgaaagtacacctacactaatagtctgtctcaacaatgagtaaaggaacttaagtattggtttaatattaaccttgtatctcattttgaaggaatttaatattttaagcaaggatgttcaaaatcttacatataataagtaaaaagtaagactgaatgtctacgttcgaaacaaagtaatatgaaaatatttaaacagcattacaaaatcctagtttatactagactaccatttaaaaatcatgtttttatataaatgcccaaatttgagatgcattattcctattactaatgatgtaagtacgaggataaatccaagaaactttcaactctttgcctttcctggcctttactggatcccaaaagcatttaaggtacatgttccaaaaactttgaaaagctaaatgtttcccatgatcgctcattcttcttttatgattcatacgttattccttataaagtaagaactttgttttcctcctatcaaggcagctattttattaaatttttcacttagtctgagaaatagcagatagtctcatatttaggaaaactttccaaataaaataaatgttattctctgataaagagctaatacagaaatgttcaagttattttactttctggtaatgtcttcagtaaaatattttctttatctaaatattaacattctaagtctaccaaaaaaagttttaaactcaagcaggccaaaaccaatatgcttataagaaataatgaaaagttcatccatttctgataaagttctctatggcaaagtctttcaaatacgagataactgcaaaatattttccttttatactacagaaatgagaatctcatcaataaattagttcaagcataagatgaaaacagaatattctgtggtgccagtgcacactaccttcccacccatacacatccatgttcactgtaacaaactgaatattcacaataaagcttctgagtaacactttctgattactcatgataaactgacatggctaactgcaagaattaaatcttctatctgagagtaataatttatgatgactcagtggtgccagagtaaagtttctaaaataacattcctctcacttgtaccccactaaaagtattagactacacattacattgaagttaaacacaaaattatcagtgttttagaaacatgagtccggactgtgtaagtaaaagtacaaacattatttccaccataaagtatgtattgaaatcaagttgtctctgtgtacagaatacatacttattcccatttttaagcatttgcttctgttttccctacctagaatgtcagatgtttttcagttatctccccatttgtcaaagttgacctcaagataacatttttcattaaagcatctgagatctaagaacacaattattattctaacaatgattattagctcattcacttattttgataactaatgatcacagctattatactactttctcgttattttgtgtgcatgcctcatttccctgacttaaacctcactgagagcgcaaaatgcagctttatactttttactttcaattgcctagcacaatagtgagtacatttgaattgaatatataataaatattgcaaaataaaatccatctaaatagaagggttctgttttatttggaaaaattgaatctttaaactatcataatcttgaatgactgtcatctttctagttttcagaaaaataatgtattcctatattatttttatgataaaacttatggagcaaaacaccatcaaataactctcaaattaagaaaaaattcaaaagtcagtagttttagataagataatgataagggagaaagaacattggtaaaaggtatgaattccagaattaaagaaataatttggggatttctagataagaggatatatatgaacatgcataccttacaccttcatatacacaaccttaaatcacaaataaaacaaaataaacaatacaaattataccaccaagattcagaagatatcagacgaaataattagagaaagtaaaaatatgctgtctccattatattcataatgtttcattcttgacactaataattagaggctttaaatttttaaatgatttactttttactaacattgctgaaaaaaactaaagacatacataaatggaaagatgtcttgtgtttatggatggtaagatttaatgttgttaagacaacaatactatccaatatgatatgcagactgaacacagttgccatcaaaatctcaatgatgctttcacacaaataaaatggaacttcaagagacccccaaataaagagaagaatcttgaaaataaaaaaaaaaaaa

SEQ ID NO: 184 - DNA, 4194 bp, Artificial Sequence
  HDAC6
gaagagggttagcgaaacgttagcggtcgggtctgggcagggggtggagctggttgaaggaacggggcagtcccctgaggagcggggctggttgaaacgctaggggcgggatctggcggagtggaagaaccgcggcaggggccaagcctcctcaactatgacctcaaccggccaggattccaccacaaccaggcagcgaagaagtaggcagaacccccagtcgccccctcaggactccagtgtcacttcgaagcgaaatattaaaaagggagccgttccccgctctatccccaatctagcggaggtaaagaagaaaggcaaaatgaagaagctcggccaagcaatggaagaagacctaatcgtgggactgcaagggatggatctgaaccttgaggctgaagcactggctggcactggcttggtgttggatgagcagttaaatgaattccattgcctctgggatgacagcttcccggaaggccctgagcggctccatgccatcaaggagcaactgatccaggagggcctcctagatcgctgcgtgtcctttcaggcccggtttgctgaaaaggaagagctgatgttggttcacagcctagaatatattgatctgatggaaacaacccagtacatgaatgagggagaactccgtgtcctagcagacacctacgactcagtttatctgcatccgaactcatactcctgtgcctgcctggcctcaggctctgtcctcaggctggtggatgcggtcctgggggctgagatccggaatggcatggccatcattaggcctcctggacatcacgcccagcacagtcttatggatggctattgcatgttcaaccacgtggctgtggcagcccgctatgctcaacagaaacaccgcatccggagggtccttatcgtagattgggatgtgcaccacggtcaaggaacacagttcaccttcgaccaggaccccagtgtcctctatttctccatccaccgctacgagcagggtaggttctggccccacctgaaggcctctaactggtccaccacaggtttcggccaaggccaaggatataccatcaatgtgccttggaaccaggtggggatgcgggatgctgactacattgctgctttcctgcacgtcctgctgccagtcgccctcgagttccagcctcagctggtcctggtggctgctggatttgatgccctgcaaggggaccccaagggtgagatggccgccactccggcagggttcgcccagctaacccacctgctcatgggtctggcaggaggcaagctgatcctgtctctggagggtggctacaacctccgcgccctggctgaaggcgtcagtgcttcgctccacacccttctgggagacccttgccccatgctggagtcacctggtgccccctgccggagtgcccaggcttcagtttcctgtgctctggaagcccttgagcccttctgggaggttcttgtgagatcaactgagaccgtggagagggacaacatggaggaggacaatgtagaggagagcgaggaggaaggaccctgggagccccctgtgctcccaatcctgacatggccagtgctacagtctcgcacagggctggtctatgaccaaaatatgatgaatcactgcaacttgtgggacagccaccaccctgaggtaccccagcgcatcttgcggatcatgtgccgtctggaggagctgggccttgccgggcgctgcctcaccctgacaccgcgccctgccacagaggctgagctgctcacctgtcacagtgctgagtacgtgggtcatctccgggccacagagaaaatgaaaacccgggagctgcaccgtgagagttccaactttgactccatctatatctgccccagtaccttcgcctgtgcacagcttgccactggcgctgcctgccgcctggtggaggctgtgctctcaggagaggttctgaatggtgctgctgtggtgcgtcccccaggacaccacgcagagcaggatgcagcttgcggtttttgctttttcaactctgtggctgtggctgctcgccatgcccagactatcagtgggcatgccctacggatcctgattgtggattgggatgtccaccacggtaatggaactcagcacatgtttgaggatgaccccagtgtgctatatgtgtccctgcaccgctatgatcatggcaccttcttccccatgggggatgagggtgccagcagccagatcggccgggctgcgggcacaggcttcaccgtcaacgtggcatggaacgggccccgcatgggtgatgctgactacctagctgcctggcatcgcctggtgcttcccattgcctacgagtttaacccagaactggtgctggtctcagctggctttgatgctgcacggggggatccgctggggggctgccaggtgtcacctgagggttatgcccacctcacccacctgctgatgggccttgccagtggccgcattatccttatcctagagggtggctataacctgacatccatctcagagtccatggctgcctgcactcgctccctccttggagacccaccacccctgctgaccctgccacggcccccactatcaggggccctggcctcaatcactgagaccatccaagtccatcgcagatactggcgcagcttacgggtcatgaaggtagaagacagagaaggaccctccagttctaagttggtcaccaagaaggcaccccaaccagccaaacctaggttagctgagcggatgaccacacgagaaaagaaggttctggaagcaggcatggggaaagtcacctcggcatcatttggggaagagtccactccaggccagactaactcagagacagctgtggtggccctcactcaggaccagccctcagaggcagccacagggggagccactctggcccagaccatttctgaggcagccattgggggagccatgctgggccagaccacctcagaggaggctgtcgggggagccactccggaccagaccacctcagaggagactgtgggaggagccattctggaccagaccacctcagaggatgctgttgggggagccacgctgggccagactacctcagaggaggctgtaggaggagctacactggcccagaccacctcggaggcagccatggagggagccacactggaccagactacgtcagaggaggctccagggggcaccgagctgatccaaactcctctagcctcgagcacagaccaccagacccccccaacctcacctgtgcagggaactacaccccagatatctcccagtacactgattgggagtctcaggaccttggagctaggcagcgaatctcagggggcctcagaatctcaggccccaggagaggagaacctactaggagaggcagctggaggtcaggacatggctgattcgatgctgatgcagggatctaggggcctcactgatcaggccatattttatgctgtgacaccactgccctggtgtccccatttggtggcagtatgccccatacctgcagcaggcctagacgtgacccaaccttgtggggactgtggaacaatccaagagaattgggtgtgtctctcttgctatcaggtctactgtggtcgttacatcaatggccacatgctccaacaccatggaaattctggacacccgctggtcctcagctacatcgacctgtcagcctggtgttactactgtcaggcctatgtccaccaccaggctctcctagatgtgaagaacatcgcccaccagaacaagtttggggaggatatgccccacccacactaagccccagaatacggtccctcttcaccttctgaggcccacgatagaccagctgtagctcattccagcctgtaccttggatgaggggtagcctcccactgcatcccatcctgaatatcctttgcaactccccaagagtgcttatttaagtgttaatacttttaagagaactgcgacgattaattgtggatctccccctgcccattgcctgcttgaggggcaccactactccagcccagaaggaaaggggggcagctcagtggccccaagagggagctgatatcatgaggataacattggcgggaggggagttaactggcaggcatggcaaggttgcatatgtaataaagtacaagctgttaaaaaacctggaaaaaaaaaaaaaaaaaaaa

SEQ ID NO: 185 - DNA, 2051 bp, Artificial Sequence
  DHRS7
tggggccgcgagtgctgagcccggcgcgcccgagccgctcctcctcccggcctgctccctgggcggagccggggcagtgcggctctgggctggccgaaggggtggcgctgcgatcccgcagggcagcgacgcgactctggtgcgggccgtcttcttccccccgagctgggcgtgcgcggccgcaatgaactgggagctgctgctgtggctgctggtgctgtgcgcgctgctcctgctcttggtgcagctgctgcgcttcctgagggctgacggcgacctgacgctactatgggccgagtggcagggacgacgcccagaatgggagctgactgatatggtggtgtgggtgactggagcctcgagtggaattggtgaggagctggcttaccagttgtctaaactaggagtttctcttgtgctgtcagccagaagagtgcatgagctggaaagggtgaaaagaagatgcctagagaatggcaatttaaaagaaaaagatatacttgttttgccccttgacctgaccgacactggttcccatgaagcggctaccaaagctgttctccaggagtttggtagaatcgacattctggtcaacaatggtggaatgtcccagcgttctctgtgcatggataccagcttggatgtctacagaaagctaatagagcttaactacttagggacggtgtccttgacaaaatgtgttctgcctcacatgatcgagaggaagcaaggaaagattgttactgtgaatagcatcctgggtatcatatctgtacctctttccattggatactgtgctagcaagcatgctctccggggtttttttaatggccttcgaacagaacttgccacatacccaggtataatagtttctaacatttgcccaggacctgtgcaatcaaatattgtggagaattccctagctggagaagtcacaaagactataggcaataatggagaccagtcccacaagatgacaaccagtcgttgtgtgcggctgatgttaatcagcatggccaatgatttgaaagaagtttggatctcagaacaacctttcttgttagtaacatatttgtggcaatacatgccaacctgggcctggtggataaccaacaagatggggaagaaaaggattgagaactttaagagtggtgtggatgcagactcttcttattttaaaatctttaagacaaaacatgactgaaaagagcacctgtacttttcaagccactggagggagaaatggaaaacatgaaaacagcaatcttcttatgcttctgaataatcaaagactaatttgtgattttactttttaatagatatgactttgcttccaacatggaatgaaataaaaaataaataataaaagattgccatgaatcttgcaaaaaaggtattaactcatactatattcttggataaaataaccttttaaaatactttagcacatatgcttaaaatctaagttaacagatttgtcttagtccatttgtgctgctataacaaaataccacagatttggtaatttataaacaacagaaatctgtttttcctggctcttgaggctgggaattccaagaccaatgcaccagcagaattagtgtctggtgaaggctgatctctgcttccaagatggcacctcattgctgcatcctccacagtggaggaatgtatgtcctcacatggtggaagggacagaagggaaagaggagcaaaatgctttcaaaagagcatttaatctcattcattactcagtcacctcttaaaggccacatcctttaatactgttgctttggggattaagtttcgacatgaattttggaggggacaaaaacatccaaaccatagcaacataaatgtatagaatatttcacacaaagcagagtgctgggtaatgaccagatataaagaagtatttgaaatgaccttacctccaagatgcttatactcttagaaaagttgacaggtacagatggctgtaatttgaagcagcaggtaggattcattgcacctattattcattaaacacctgttgtatgtcttctactgta

SEQ ID NO: 186 - DNA, 11269 bp, Artificial Sequence
  PIAS2
cggaggcggagctcccgcgccgttcacgtgacgggcccggctgtagcggcggcggccgcggcgtcttaagcggcgcccagtgcaggatggtgctggaggcggcggcggccgtggtggcggcagcgtcgttggcggcagcgggagtgggtgcggcggcagcggcggcggcgcccgcgggtggtataaaatggcggatttcgaagagttgaggaatatggtttctagttttagggtttctgaactacaagtattactaggctttgctggacggaataaaagtggacgcaagcatgacctcctgatgagggcgctgcatttattgaagagcggctgcagccctgcggttcagattaaaatccgagaattgtatagacgccgatatccacgaactcttgaaggactttctgatttatccacaatcaaatcatcggttttcagtttggatggtggctcatcacctgtagaacctgacttggccgtggctggaatccactcgttgccttccacttcagttacacctcactcaccatcctctcctgttggttctgtgctgcttcaagatactaagcccacatttgagatgcagcagccatctcccccaattcctcctgtccatcctgatgtgcagttaaaaaatctgcccttttatgatgtccttgatgttctcatcaagcccacgagtttagttcaaagcagtattcagcgatttcaagagaagttttttatttttgctttgacacctcaacaagttagagagatatgcatatccagggattttttgccaggtggtaggagagattatacagtccaagttcagttgagactttgcctggcagagacaagttgccctcaagaagataactatccaaatagtctatgtataaaagtaaatgggaagctatttcctttgcctggctatgcaccaccgcctaaaaatgggattgaacagaagcgccctggacgccccttgaatattacatctttagttaggttatcttcagctgtgccaaaccaaatttccatttcttgggcatcagaaattgggaagaattactctatgtctgtatatcttgtacggcagcttacatcagccatgttattacagagattaaaaatgaaaggtattagaaaccctgatcattccagagcactaattaaagaaaaacttactgcagatcctgatagtgaaattgctacaactagccttcgggtatccttgatgtgccctttaggaaaaatgaggctgacaatcccatgccgtgcagtgacttgtacacatctgcagtgttttgatgctgccctctatctacaaatgaatgagaaaaagcccacctggatttgtcctgtgtgtgacaaaaaagctgcctatgaaagtctaatattagatgggctttttatggaaattctcaatgactgttctgatgtagatgagatcaaattccaagaagatggttcttggtgtccaatgagaccgaagaaagaagctatgaaagtatccagccaaccgtgtacaaaaatagaaagttcaagcgtcctcagtaagccttgttcagtgactgtagccagtgaggcaagcaagaagaaagtagatgttattgatcttacaatagaaagctcttctgacgaagaggaagaccctcctgccaaaaggaaatgcatctttatgtcagaaacacaaagcagcccaaccaaaggggttctcatgtatcagccatcttctgtaagggtgcccagtgtgacttcggttgatcctgctgctattccgccttcattaacagactactcagtaccattccaccatacgccaatatcaagcatgtcatcagatttgccaggtttggattttctttcccttattccagttgatccccagtactgtcctcctatgtttttggatagtctcacctcacccttaacagcaagcagtacgtctgtcaccaccaccagctcccatgaaagcagtactcatgttagttcatccagcagcaggagtgagacaggggtcataaccagcagtggaagtaacattcctgacatcatctcattggactaaaggaggactcacttgattctgggaatcattcatcagaactgctttttcttggatctctagtctgtggaaacgttcttttttttttttttttaataatttggtatttattgaaagtcagatggattcttttgctttctgaggggtgaacacagaagactgcaacaagaaccaaatgacatgcaaggatttttcttaattatgctgtactctcagcatcagatacattcaaccataactgtatcttcctgagagatggatttcactttcatacgttaatggatggagtctacaaatcagtgaaaaaagtttttgttaaaataaagagcaataaaattatgtaaatattcaagtaaccttttttctaattaaaaaaaaaattgtaatcactgattctagaatgacagcaacttctgtttaaccttacgtgaaggaaaaaaaatatatggaaagaacttaatgtttgctgaatgagtcctttccatggagatttgctctgtttcattgaagtaatgaagtttcagtacgtggccaaagcttggattccacttttcgtcctgcatttccacttttcttcgtgattgcatcaaagaaaaatggcattcgtgttacttggtttttttcctgcttatcatttacactttgacgttgtttgctaatgagtgctgtgtgaagttctgggatttggctactcttcattggtgattatgtttaaaagcactatgcagattctgccctgacataaagtgtgttattatgtttttagtaattgtacatttttcattctagagttttctataaatttgaggcttgccttctcaaaaaagaaactatgcagccattgaatgaaatgtctttggggtacggtgtgactggaatgtttgttagaaatttgttcacactatcaaatattgatatcttggagccagcagaagagcagattttgggaggtggtaataacaaaatttaatttcttcccaacaacttaattttctcatttattttacagaatagtagtgaaatatttgatgaaactttgtattttggtagcactacatagaaaatgtgttttagatttatgatgatcatatttctcaccaatgtaatttcagtctcagcagtgattttcaaacttagggaaagggacagcattagattttttttttttttcatttttttaaaatgatatcttacctgaaactacaaacgacaaaagagaattagaaatgtttgaattaaagtgaagaagggttgggggagatgggcctgaacccacttcctgtctcaatccatgctaccccaaacactccagggaacctctgaggttttattgggtgcactttgaaaatttctcttctatagtgtgtttgtttgattttaaatcacagagaaaactgggttttactcttagagaaacattttcatccagttttttagtttgcttcatttgacttcctaaatcatttttgagttcacaaggatttggtacttttctgtttagctttctctctctaagctttatctaccttaaaaacaaagtcctttttttaatggccagtccaaccaattgatttctcaaactgaagtgcccaggtgtggactcatcaatttccgttagaatagggacatcctacttaagagttggtgcagctccaaggagctgacttgtccttgcttggggttttttttttttttctttcaccttctcaagtttccatggcctttgtgtgttctttttatgttgatttaaattcatatggttttccacaaatcccttctttggctacattgtctccttattcaatggattatccctttgtgggggctgcttattttaaagatgttgggggggaaacaaacccaaatctacgagcagtagttgcacatagttgccagttttaccttcttagtcattagatttccaaaccatgttgcagttttttggtccagatatagtatttctttctaataaagttttatgttgctgctctaaatacagatgcaatatttattgactctgtaatcagatagaaaaaacttaacttggtttgtgtggtatgacttataaagaaatgatgtatatttgttattttgttaccctttagattgtcagagactcccccaatttaatcaacaaagttttataaagtaaatgaaaatattaatagaaattagtttatttacttggttcttataactgatatctctgtgcttttataattgtgatttgtttttttgtttttttttctattttctgtgaacagttttaatgttcggttttggtgttttacactgaaattacatataaatttttaatttatttcatacaggcaacttgcattttaaaaaatacactttgaagtttatcatcttgaaattggggcttacgttgtttatctgtcttgagcattagtactttatgactttggccttatggcaacatcatgattattaatccgtcagcctttaatgtggtcactgtttcttatccagaccctgactttctagtagtttattttgctagcccagatttctgcttaaccaaatataagggagtttcagaggggtgatcttagctgtcacctagattctgtcagccaaccagtgattgtctggaatatcttaggaaatgaactgtaattgtcagcctcctaaaatcaatttttttttttttttttttgaggctgagtcttgctcttgttgcccgggatggagtgcaatggtgcgatcttggctcaccgcaacctccacctacagggttcaagcgattctcctgcctcagcctcccgagtagctgggattacaggcatgtatcaccacgcccagctaattttgtatttttagtagatacggggtttctccattttggtcaggctggtctcgaactcccgacctcaggtgatccgcctgccttggcctcccaaagtgctgggatttacaggcgtgagccaccgcgcctggccaaaataaaatgtttttatctttcttcacttagaactatgaaggccttttcttgttctggtaaccccccacagtgtaattggtgctgaaaatagtttcgtgcctgaggtctgttgtcactcactcactttctgacaattaggtgagccacttgaggattttctggcctgaagttataaaaacttggcatctgtcctaaggtaattgtaaaggcaaaatgaaagcattgaggtgaatttaggttatatggcatttatctggtaatgtgtttcagaaaagctagaatgaaaatgtgatgtaagggatagcaagtgtaggttgattcataattcttggtataaaaccaagttttccttagtcttgaggaatttgaagaaaggtaaaatgttggattttaagcaaagtaggattgaccagagactgttctgactttgacattcagacctttcagatgttcttccttcagaccagtccaagacactcagcatttccagccaagttgtcttttttttctgccaataaagtattcattagttgacgtttgtttgtattttaagtaaagtcaattttttttaaagcattaatttaattcacgggtatgcctttcatttctctggccttcagttggtttaaaaaaaaaaaaaaaaaaaaaagcacttagccggaccattctttctttagtaaacatttttattttcttaatttttcctgaaagattttcttcattttcatggaatgtcataatgacactaccattattttctagctctttgcataatagaaaaatgtagagcagtgcaccatttaaacacgtctgacattggatttagtggtcctaggttcatgtgatttgggagccttaagttgttatttagattgattcagcctgattcaccatcttttttactacagttctacatgaatgtggtgaaacaggtagaagaaaattaagcatttctctgcttttggagtctaatgttcctgcctagtgactggtttgtaacacccccctcacccctactttgttaggaacctgcaattcctaaaagaaataaataaagctgtacccaatgtccattctttaatgcttgcctggttgaataatgtttgttttttctgtttatgtcagtagtacatgcttattgtggaaaatttagacaatacagaaaagtataacaattaattgcctatgattctgtcaccagaaaaaatcacttgatatttttgcatcttccttgccattgtctttgctacttctgcatatttttacttagtttcatcattctcagtgtaatttatatcttggggtttttccccgcaacctacaggcattattccatgtcattaaaactgtgtcaactattattaattttatggtactccattgttatggatgtgccatgtttcatataacctttacttattttgaacagtttagattatatctcataatgccacaatgaatgtctttgtgtataaattattttcttaggataaaatactggaggtggaatttctagtcaagggtatatgaacacttttgtagttcttgattcataccacttttccacatgggtatgttaatttatactgcagctagatggtatgggaagggtggtctagccatattttccaagaacatgcaacgttttatctttatgcaggcatctgcactaagaccctctgcctttctgactctatggaacggggttaactgatatggagatcattggcagagattttcccaagctttcttagttttaaatatatctgacatgggccgggtatggaggctcacgcctgtaatcccagcactttgggaggccaaggcgggcagataatctgaagtcaggagttggagaccagcctggctaacatggaacatggtgaaaccccatctctagcaaaaacataaattaggtgggtgtgatggcaggcgcctgtagtcccagctacttgggagaccgaggcaggagaatcgcttgaacccaggaggcggaggatttgcagtgatccgagattgtgccactgcactccagcctgggtaacaaagcaagactctctaaaaaaaaaaaaaaaaaaaaaaaaaaatatatatatatatatatatatatatataaaatctgacatgtttcagaaacacctacgtatggctatccaagcttttcccatgattttactggcactgtaaagttgcacaaatattctttgtcagactacgttttccatctttagttcaaaagttttgtcactttttaaaaaaagcctcttgtacctaaggcctgcccttaagaggtcagctctctttttcctcttcctgtaggccccattatggcctttctgagctccccaaagccagtagaatctactgagccaaaggcattccatccccaaactgaaaagtggtaaggctaaaagctataaaaacaggcaaacattgcctgttttcactttatattcccttatgtttccaataagggtagctgcagggaaagaaaaaaacagattgctaccttcagatgtttgaggtacaacattttcttgattggcgtagcacaatcatttcccaaactgcttcctatttctgaatggcttttttaaaaagctttattttgtgttctcaaagcttaattattttaagtgacgaagagtgttaccgtgttgtagaatagcatatgcctcttattttggccttcatcaaactgtttaataaatgtttagagtgttttgtaagtacacgtggaatagagtgttacagaagttttggttccagacatcaggcagcttataatcaaggttccaaaaatcaagaattcttaagctgggcatggtggctcatgcctgtaatcccagcactttgggaagccaaggcaggcaaatcacttgaggccaggagtttgagaccagcctggccaacttggtaaaaccccatctctactaaaaatacaaaaaattagggcatgatggctcatgtctgtaatcccagctacttgggaggctgagggatgagaattgcttgaacctgagaggcggaggttgcagtgactcaggatcatgaccctgtactccagcctgggtgacagagtgagaccaaaaaaaaaaaaaaaaaaaaaaaaaaaaagtaacaggcattgtgcaaagaattttccaagaatgtctcattcttgcaatggcttctcagaggaaagtggtgttattccccattttacaaatgaaacaggtttaggtaagtttcccaaggtcacagtgaatgagtagtggacttgggagtctgacctagacttaccccaaaagctctctgcgtaaactgaagtgacgttaattagctgtgctatctaggagactgatatgggaatctagacttaaaattatgagaactggtttcagatgatggccagagtaataaggaaggagtggatgctgaagccatttcaaaggaagactcaagattcagtgactgaatataggagtaagggttgagtgcatttttcatccatttttcaagcctgggtaacttggatgttaatggcactatctacagagacaggaggcagtttagagtgaagacgaatcatgtatgggagacagtgatgaatgttaagcatgggatttcagaaatgaagcatccatgaggctcattcctggtttttctgcagtcttttaaataaaagtacaaacctcccttgtcatccatttttgccttcacttatctccattctgtattatgttctagtcacgccccagtcactgatcccttcctaggccatacttggctacatcttagccttttcttttgatttttctcttcactgccttgcccattacaaatttggctgccacctgaggccctgccataccctacagctcacaccagcgtgggctgtgttcacattctacatatctcaagatacagtggttgctgtccttcccccctactgcatcgttacacgtctctaaaaaatctctgcctctgaagctcatgccaagaggttatactatcagctacctctagtcttataactgcctgatcattccctttgatttgctggaagctttgactcacagtgttccttgccttccttgattctggtcattattattaatatcttgaacattctatagatgatttatccaagttggtctgtgaggtattggttactttacctccagcattttcgtctactgaaccacgctttctgttttcctctttgctacttgtccagactgttctttcattattgcagccttgaagaaatcctcagtaacctatccatcctccgacatgacgtagcatagttcctttgcccattctcatcagttataacaaatgttattgccctcttttcaggccacttccttctcagaagatgactttgctgcttaattcaaacagaagggacagtccgaaagcatgatttcttccccacctatgaccacctccatccttttttgtttccagtttcagagaatgaggtaggcctttaaggccaactgactctggtctcctcctgtcatcttcaggaccttcctctgtcagacttcccctctcttatctccatgtctctcacctctctactgctgcttttcttggcttacaaatggtctcagtcatccagtatttgagattatattaggtgccaggcattgtatcaggcacttggaacacaaggcaggatcctgcccccaccaaagttgtgctccaatagcgtcaacagaggtgtgaaatagggagattacaatgttaatggtaaaagacaaagtatagggtgctacaagagcatgtaaatgaggcacctcaatgatttaatagaagtaatgtggagaaatgtgaggattgatgaaaagcttgtccaaaaagggccagaaatgtttagaattgctggaagtttgctaaggaatattgagaaatatgcatagatagatcgtgaagggccttgtaaaacagtgatgagacattgaagagttttcatgatcattagtagtaatgagaatttgttgagtttggcatgattatctccatattacaaatgtggaaacagattctgacaggataagcgacttacttgcccagggtcatgcagcttgtaattgaggagtcaggtttcaaatccagttttaactactttctcagaggcctttcttgatcattctatctaaaaagcaagtgttccctaactattatcccagtaccctggtttatatactcttaatacataaaataatccctgcatattgtgtgtttcccctactagattgtaagctccatgagggcagaggtgataacttttttcacttgcatcccagagcctaacatgatatgggctacatagaaggtgcccagtaaatattggtggatgaagaaatggtggataaccatttgcatttgacttatgctgactggaaattcaatacctttggaatatataatacctcagcagtaagcattcaccaagagaggaaaacagaaggaggtgcatgtttagggtaggtggtacgggagatggatgctgaggtgttgaaaggcagcatactcaccttctgaactccaaaacttacaggggcaagggccattaatgaggggtgggtagagcagtgcacagtggggataatatgggagtaggtgtattaaacctggaagtgtaagcaactccttgtagacccaccctactgtgtataaaaggctggagaaattcttcatatgatctactctaggttatgtactgaggaccaccttatctgggtcaggtacactacacagagtgctacaatataattgtaaacataatttatcctcactgtgatggctagccacctgacccaaatcattattagactcaatactttggaactggaacaaaaatcagttgacctgatgtctgaaagacatgcccacctgctatttgacaagctatagacatatcctaccaattgatgggtagtagcactgaaactatgaaagtggatgaactcatccagaggagttgatgagtgagaaaagaagactggaaaaggaacacaaggaaatcaagaagcagcagctgagactgaaggaaaataacgtggtattacagaggccaaaaaatagagtatttcaagaagcaagtggttagtggagttaaaagctgctgatacaacctaaaaaagtaagtatccattttttaaaaaactttcatttaaaataccaccatattttattgaatctaagtacctgattgtaagacattaaagaaaaattaaacctgctaattaaaaaaaaaa

SEQ ID NO: 187 - DNA, 8217 bp, Artificial Sequence
  FRRS1L
atgcgcagaccgaggcagggaggcgggggtgcgggaggctccgcggctgcgcgggcgcgtgctggtggcctcggcggaggctcagtcccggcccgcgcccgcggcgcccccgctgcggcccgagcggcctggctgcgggatctgtgcgcacggatggcgcggccgccccggcagcacccgggggtctgggcgtcgctgctcctgctgctactgacggggcccgccgcctgcgcagccagccccgcggacgacggtgcgggcccggggggccggggaccccggggacgcgcgcggggggacacgggcgccgacgaggcggtgccgcgccacgactcctcctacggcaccttcgcgggggagttctacgacctgcgctacctgtcggaggagggttaccccttccctactgctcctcctgtggatccatttgccaaaatcaaagtggacgactgtggaaaaactaagggatgctttagatatggcaaaccaggctgtaatgcagagacctgtgactatttcctcagctaccggatgataggggctgatgtagaatttgagctgagtgcagacacagatggttgggtagcagttggattctcttcagacaagaaaatgggtggtgatgatgtcatggcctgcgtccatgatgacaatggcagggtccgcatacagcacttctataatgtaggccagtgggcaaaggagattcagagaaaccctgccagagatgaagaaggagtttttgagaacaatcgcgtcacctgcagatttaaacgccctgtgaatgttcccagagatgaaacaattgttgatctgcatttgagttggtattatctgtttgcttggggtccagccattcagggctctatcactcgacatgatatagactcaccgccggcttcagagcgtgttgtcagtatttacaagtatgaagacatttttatgccatcagctgcctatcaaaccttctcatctccattttgtttgcttctgattgttgctctgaccttctacctattgatgggaaccccctaaccacagctgcagggccaacagattacatggattgggaagtctttagtataaatatattttttaaagaatatccagtataattttagcttcaattatttaagaaaaaaaacctcatataatttcagctttttggaagaaagaacaagcttcttttgtagtcaaagaagattgtttaataatgaccctatacttttggaacatacttacaccttttctaagcactttcacatatgttttcttatttaacttcacaacatctctgagttggattgatgaaaattgtgattgccatcttcctgaatgggatttgagacccaaaaagactgcctttttatgatccacataccatataactttggctagaaatgacaaatagaaaggcagagaaggaactaagtatagaaatcatgtctcaaaacagtctttactatgagtgctatagcacagagagttattttgaatattactagggagaactttactgaatgtcataagttcacagtcagccttttgggcagaagaaatttcaaatttccgtaaagcagaagtgcttttggatatttacacagccaatggggagattggaggaaaatacaatgatatgaaaatagttcatatttatttgaaattttggccgagcatggtggctcacgcctgtgatcccagcactttaggaggccaagacgggcaggtcacctgaggtcaggagttcgagaccagcctggccaatgtggtgaaacccccgtctctattaaaaagtacaaaaatgagccaggcgtggtggtgcacacctataatcccagctattcgggaggctgaggcaggagaattgctggaacccaggaggcggaggttgcagtgagccgagattgtgccagtgcactccagcctaggtgacagagccagactctgtctcaaaaataactaactaaataaataatatttatttgaaatttcttctcagttagagagcagctatgggaaaacatttttactgctatttgcaaaggttggagaccaaactgtgagcattcctgaagatgtaaagttgtgttaatgatattaaaaaaaaaaaaaaagggaattcttagcagttagaatttgaacttttctaccactgaattttataaaactaaggtattcatctgtggttacagtgaattctcttgtcagagccagcataccttaagtgtgattaaaaatgtatttttttttttttttgcgatgaattttccctcttgtcgcccaggctggagtacaatggtgtgatctcagcttcactgcaacctccgcctcccaggttcaagtgattctcctgcctcagcctcctgagtagatgggattacaggcatgtgccactatgcctggctaatttttttgtatttttagtagagatggagtttcaccattttagtcaggctggtctcgaactcctgacctcaggtgatccacctgctttggcctcccagagtgctaggattacaggtgtgagccaccgtgcctggcctaaaaatgtgttatatcagacaaaacatcttagtaaaaatttagggcattttaataataagccaacagtttttgagactgtagagattttgagtagaattttttttatgaggtggctttttaaaaaataattgaaaatgggaaaatgacccataaagtgaattcacctagaatatccatttaaatgttcagacttgtggctgagcgcggtggctcacacctgtaatcccagcactttgggaggccaaggcaggcggatcacctgaggtcaggagttcgagaccagtctggccaacatggcaaaaccttgtctccactaaaaatacaaaaattagccgggtgtggtggcacatgcctgtaatcccagccacttgggaggctgaggcacgagaatcacttgaaccttggaggcagagcttgcagtgagccaaaattgtgccacttgcactccagcctgggtgacagagggagaccctgtctcaaaaaaataagtaaaataaaatgttcagacttataaactagacaggtagtcagcataattcatagtaatgccttgacattaggcgccccaaaggactcctttgttctttgttccaaatgtctgtgctaactgcccattttgaggagagaagtctgcaggtatagttagtgctgctgagacatttccactctggcattctagagttctctggcttgcccttgttgctttaaagctggttccaacttcgtgggctttatgattgagcaacactggtgattgtgatttctaataccaccctccagattcatgtcacaggtgaaagtctgcctgtggggagagctttcacattctcctggagttgaaccaaaataaggaaaacatcaacaaacacagttaccaaaagcttccaaggagggatggaggagaaattctgttcattgcagatggggagaaattaaatgacatcaagtgcataatggaactgggtaggattcaaactcaagtcccctggttcaagtccttgactccactctgggcatggctaagtctggcctgtgtctcatcttctcagctctagtggctgtttagtagtgaagatactgatatgcaggcagccatgttgtaaataagaagcaaatatttttatatttctctctcttatgtgtataatatttgagctacaaacaggttaaaacaaaagagagacttcagcttagtagcaggcagggaaggaagaagtgaatgcagcttccttccgcttacatttctaatcaagctaattatttcactagtgatttctcatttgattaccgattttgcttatttatgcttagaactttcaatgacttctcagtgccattaaggtaaaatgcaagccatttctgtgacctgcaatatcatcttttgccactcctcctcacttgctatgtcttagcaagactgagaggctctcagttcttcagacctgctctatctcacctctcattttgttcatattctccacctcttgtgcttgatgaactcctattcacctatcaggtcacaacttaaatattttttcctccaaatctctggactacataggtccaggcccccatcaaatgctcccatagcacattgggcttcctcatcaacatgctcgttatacttttctagaattgctggcttgtcctccttgttatctccctaatgcagagaccattactcatcattgtagcagatatttatccatatcaggtactcagcaaacatttgtggaatgaatctatatgtgaaactatacttctatggcaagtttgtttggttcagaaggcttgcatttcatgtatattgggagactggccaacatttttatattcttcctcctatgctcaaaccataaataattatgttagcaaacactgaactttgtcttttgaaacataaatagaaacatccttagtaacagtactaacagtaatcatttttcagaaataagaattcacaccagtgatacagaatggcctttgaccattatctcagagaactagcagtcgatagacatgctgaagtgataattccaaaaacttcagtttcattcatccctacttaaatataagagaatcaacttctattttatgtctgtattcccattttctaatatactacttgtcacagaggagatgcccaaccagtgtttttcgtaaagtacctgaatagattaataataatgctagtgaaatatatttagtgctgttctaagcactttacatgaattaactcatttaatcctcaccgcaaccataggaagtagattctattatttatccaattttacagatgaaaaaactgaggctggtcacttgacataaattaccagtgctggccaggactttagagaccatttaatccaatgctcttattttacagaggtgcagctgaagcctaaggaggtgatatgatttcctacacattcatgcaccttcgtgcacatccattaaaacttttattaaatggaacccactatccatactccaattagctaggtgccttttttcccccatttagtaatttacaattaattggaggactttttatagttatatttagaggaaaggagcatgttttactctatatcaactttcttttctgcttaaaagcattttgattctttattttaccagtcattttagttcttttaataggtttaatacacagatcaaacaagacttaaatacatttttaacaatgtaacaatttaaaagaaattgcctaaaacctaggtcttctaacttggagcccagtgctttttttattgctccgctgagtcaaaaggtgaatatataaacatgatttcagatagaatgcagaagctgtatttaattaagttggcttttgtcattaaagaaatcagaaagtttggacaactcaggaatggatttccatcctagatggtatttactactatttctggaattaagtttactgtctatattcaggattttgtgcataagagacgtgaccactgaggttgtgtgtcattcttatctctactccaggggtcagcaaactttctctgttaagggtcagatagtagttttttggcttttcagtctctgtttggctctgctataaacaatacataaatgaatgagcatggctatgttccaataaaacttaattgacactgaactttgaatttcatgtacttttcaaatgtcacaaatgttttccttttgatttttttcagaaagccattaaaaaaatccaaagaccattcttagcttgcaggctgcacaaaaacaggaagcaggcggggtttgcttatggactgtggctttcccacccttgttcttagatagggacacaccaatatatcatgattagttgtaaaggatactgccagtaacatattattactggttagttgtaagaatatcaaagttagtgaataatttgcttttaaaataaattattgttgatttatttttataaataaatggcacagggcatctcatgctcttgcattctaatatattttctggaattgatgcaaaagtggtggcagtaaagtacagagccggctaagcagcagttttgtcttaagtaactgtggtgatcatggacaaccattgcgctgaactgctcttcatggtaaggatttcagtgtttcagagtaattcattaacctagagatgttttaaaaagttgtatcggccgggcgcggtggctcaagcctgtaatcccagcacttcgggaggccgaggtgggcggatcacgagatcaggagatcgagaccatcctggctgacacggtgaaaccccatctctactaaaaatacaaaaaaaattagctgggcgtggtggcgggagcctgtagtcccagctactcaggaggctgaggcaagagaatggcgtgaacccgggaggtggagctttcaatgagccgagattgcccctctgcactccagcctgggtaacagagcaagactccgtctaaaaaataaataaataaaataaaataaaataaaataaaagttgtatcaaaatctgctgcaccatgggagtgttttacacatgtgatgtggcatctaccttatgtaccataatggaaaaatgtttgagaaccactgcactaggccaaaggctgggatgtgtatactttgctgccgtgtataattgtatgtccttgttctctaaacggaattggttatgtttagtgaacagttaggtggttctccatgtgtttatatacacagacgatccccgaatttggatggttcaacttaagagttttcaaacttacgatgatatgaaagtgatatacatttgatacattcctacaacttacaatggggttatgtcccataattgttttgacttatgatattttcaacttacaattgatgggtttactgagacataaccctcttgtaacttgaggagcatgtgtatatttgtacatacatgatggtgtgtgtttatacacaaaggcctgaatatacacaccatgagcatttgaaggtctttgtcaaggttgtttctgtttctgatctcttgcctactttaaaacccaagaggtagaacattatgcatattacaggcaaaactatgcttgagtttatagcaatgtagtttgtagaaaggattcctggatgttttactaagcctttcctcctccattcaacattatatgaattgttaagaacatataaagtaccactgttgaatgtgacttttctatactgttagttaagaaaccaagactagtgttagctgagtaactggcatgttgatgcaacctatacaggttttgtatttaattaggttccttattcagttattcaagtatccagttatttagtttcaaggtagatttctttgtttttatatttaataaaagacttgcatataagttcctcttcatgaaaatagtggctaggctagtgtgattttaagtatgtctggcaactcaaaatgtaatggattcatcaagctatttgggatttttaacataaaacacactgctgcttgattaatgtgttcagttttcccctggatatttgctattaggctgatagccatttggttggattcttctggagagtaattgattctctaaggtaatggggtgctgcagtgggtgtagcattcacccaggtcactagaatcctacctgtttcatcacatagaaggccctggccatggggaagagtgaatgcagcttctccggatgccttatttccacagacatgctgatatgctggaacaatctggctccaggagtattaatatacttttttgagactgtctacaaaatactattttgtaaaaactatgcctttacatagacattgataggttatatttgttttataacaattgtgtacctaatgtttgtgattaattttgagatttatgtatatttataagcctatcttatgtaaatttttactctaagatgtgtggcacattactaataaagacgtggatttctatttatgtaaagtaattgtagcaatattcctagatgctacctaaatgattgttctgtccatttgccatcacaaatacttttatctttggatgattatgttagtcagaatatattaattagatttaaactttaaaataagaattacaacatagtttgaaattcttcctgttgatgtaattaaagttagtttataattccttaaaaaaaaaaaaaaaaaaaaa

SEQ ID NO: 188 - DNA, 687 bp, Artificial Sequence
  SCRG1
cagtcctggctggagcagcgagtctgtcgatcccaggccagagacaaggcagacaaaggttcatttgtaaagaagctccttccagcacctcctctcttctccttttgcccaaactcacccagtgagtgtgagcatttaagaagcatcctctgccaagaccaaaaggaaagaagaaaaagggccaaaagccaaaatgaaactgatggtacttgttttcaccattgggctaactttgctgctaggagttcaagccatgcctgcaaatcgcctctcttgctacagaaagatactaaaagatcacaactgtcacaaccttccggaaggagtagctgacctgacacagattgatgtcaatgtccaggatcatttctgggatgggaagggatgtgagatgatctgttactgcaacttcagcgaattgctctgctgcccaaaagacgttttctttggaccaaagatctctttcgtgattccttgcaacaatcaatgagaatcttcatgtattctggagaacaccattcctgatttcccacaaactgcactacatcagtataactgcatttctagtttctatatagtgcaatagagcatagattctataaattcttacttgtctaagacaagtaaatctgtgttaaacaagtagtaataaaagttaattcaatctaatttttctctgtggaaaaa

SEQ ID NO: 189 - DNA, 1417 bp, Artificial Sequence
  GDF15
ctgaggcccagaaatgtgccctagctttactaggagcgcccccacctaaagatcctccccctaaatacacccccagaccccgcccagctgtggtcattggagtgtttactctgcaggcagggggaggagggcgggactgagcaggcggagacggacaaagtccggggactataaaggccggtccggcagcatctggtcagtcccagctcagagccgcaacctgcacagccatgcccgggcaagaactcaggacggtgaatggctctcagatgctcctggtgttgctggtgctctcgtggctgccgcatgggggcgccctgtctctggccgaggcgagccgcgcaagtttcccgggaccctcagagttgcactccgaagactccagattccgagagttgcggaaacgctacgaggacctgctaaccaggctgcgggccaaccagagctgggaagattcgaacaccgacctcgtcccggcccctgcagtccggatactcacgccagaagtgcggctgggatccggcggccacctgcacctgcgtatctctcgggccgcccttcccgaggggctccccgaggcctcccgccttcaccgggctctgttccggctgtccccgacggcgtcaaggtcgtgggacgtgacacgaccgctgcggcgtcagctcagccttgcaagaccccaggcgcccgcgctgcacctgcgactgtcgccgccgccgtcgcagtcggaccaactgctggcagaatcttcgtccgcacggccccagctggagttgcacttgcggccgcaagccgccagggggcgccgcagagcgcgtgcgcgcaacggggaccactgtccgctcgggcccgggcgttgctgccgtctgcacacggtccgcgcgtcgctggaagacctgggctgggccgattgggtgctgtcgccacgggaggtgcaagtgaccatgtgcatcggcgcgtgcccgagccagttccgggcggcaaacatgcacgcgcagatcaagacgagcctgcaccgcctgaagcccgacacggtgccagcgccctgctgcgtgcccgccagctacaatcccatggtgctcattcaaaagaccgacaccggggtgtcgctccagacctatgatgacttgttagccaaagactgccactgcatatgagcagtcctggtccttccactgtgcacctgcgcggaggacgcgacctcagttgtcctgccctgtggaatgggctcaaggttcctgagacacccgattcctgcccaaacagctgtatttatataagtctgttatttattattaatttattggggtgaccttcttggggactcgggggctggtctgatggaactgtgtatttatttaaaactctggtgataaaaataaagctgtctgaactgttcaaaaaaaaaaaaaaaaaa

SEQ ID NO: 190 - DNA, 984 bp, Artificial Sequence
  GZMB
ggggaacatgaagtcactgagcctgctccacctctttcctctcccaagagctaaaagagagcaaggaggaaacaacagcagctccaaccagggcagccttcctgagaagatgcaaccaatcctgcttctgctggccttcctcctgctgcccagggcagatgcaggggagatcatcgggggacatgaggccaagccccactcccgcccctacatggcttatcttatgatctgggatcagaagtctctgaagaggtgcggtggcttcctgatacgagacgacttcgtgctgacagctgctcactgttggggaagctccataaatgtcaccttgggggcccacaatatcaaagaacaggagccgacccagcagtttatccctgtgaaaagacccatcccccatccagcctataatcctaagaacttctccaacgacatcatgctactgcagctggagagaaaggccaagcggaccagagctgtgcagcccctcaggctacctagcaacaaggcccaggtgaagccagggcagacatgcagtgtggccggctgggggcagacggcccccctgggaaaacactcacacacactacaagaggtgaagatgacagtgcaggaagatcgaaagtgcgaatctgacttacgccattattacgacagtaccattgagttgtgcgtgggggacccagagattaaaaagacttcctttaagggggactctggaggccctcttgtgtgtaacaaggtggcccagggcattgtctcctatggacgaaacaatggcatgcctccacgagcctgcaccaaagtctcaagctttgtacactggataaagaaaaccatgaaacgctactaactacaggaagcaaactaagcccccgctgtaatgaaacaccttctctggagccaagtccagatttacactgggagaggtgccagcaactgaataaatacctcttagctgagtggaaaaaaaaaaaaaaaaaa

SEQ ID NO: 191 - DNA, 7987 bp, Artificial Sequence
  CNTN2
gaggaccagagccagccagtgagcggagcctgggagagggaggagcacatcttgatgcagagatgctgcagtggctccgggcgcgctcacacacacgcgccctcacccgccaccgccgccgcggccgccgccgcacccggacagcgagcggctgaggccgccagggcccaaaggacagcggcccagacaggggctggcggcccggccggccccggctcaccgactcgggcagcatccacctgccccagccaacacccttctctcgccccaggtcctttctcagcctccagctgggctgtccccaagctgagctgaggctcttctcctccgatccccacctctgcccggacatccaccatggggacagccaccaggaggaagccacacctgctgctggtagctgctgtggcccttgtctcctcttcagcttggagttcagccctgggatcccaaaccaccttcgggcctgtctttgaagaccagcccctcagtgtgctattcccagaggagtccacggaggagcaggtgttgctggcatgccgcgcccgggccagccctccagccacctatcggtggaagatgaatggtaccgagatgaagctggagccaggttcccgtcaccagctggtggggggcaacctggtcatcatgaaccccaccaaggcacaggatgccggggtctaccagtgcctggcctccaacccagtgggcaccgttgtcagcagggaggccatcctccgcttcggctttctgcaggaattctccaaggaggagcgagacccagtgaaagctcatgaaggctggggggtgatgttgccctgtaacccacctgcccactacccaggcttgtcctaccgctggctcctcaacgagttccccaacttcatcccgacggacgggcgtcacttcgtgtcccagaccacagggaacctgtacattgcccgaaccaatgcctcagacctgggcaactactcctgtttggccaccagccacatggacttctccaccaagagcgtcttcagcaagtttgctcagctcaacctggctgctgaagatacccggctctttgcacccagcatcaaggcccggttcccagcagagacctatgcactggtggggcagcaggtcaccctggagtgcttcgcctttgggaaccctgtcccccggatcaagtggcgcaaagtggacggctccctgtccccgcagtggaccacagctgagcccaccctgcagatccccagcgtcagctttgaggatgagggcacctacgagtgtgaggcggagaactccaagggccgagacaccgtgcagggccgcatcatcgtgcaggctcagcctgagtggctaaaagtgatctcggacacagaggctgacattggctccaacctgcgttggggctgtgcagccgccggcaagccccggcctacagtgcgctggctgcggaacggggagcctctggcctcccagaaccgggtggaggtgttggctggggacctgcggttctccaagctgagcctggaagactcgggcatgtaccagtgtgtggcagagaataagcacggtaccatctacgccagcgccgagctagccgtgcaagcactcgcccctgacttcaggctgaatcccgtgaggcgtctgatccccgcggcccgcgggggagagatccttatcccctgccagccccgggcagctccaaaggccgtggtgctctggagcaaaggcacggagattttggtcaacagcagcagagtgactgtaactccagatggcaccttgatcataagaaacatcagccggtcagatgaaggcaaatacacctgctttgctgagaacttcatgggcaaagccaacagcactggaatcctatctgtgcgagatgcaaccaaaatcactctagccccctcaagtgccgacatcaacttgggtgacaacctgaccctacagtgccatgcctcccacgaccccaccatggacctcaccttcacctggaccctggacgacttccccatcgactttgataagcctggagggcactaccggagaactaatgtgaaggagaccattggggatctgaccatcctgaacgcccagctgcgccatggggggaagtacacgtgcatggcccagacggtggtggacagcgcgtccaaggaggccacagtcctggtccgaggtccgccaggtcccccaggaggtgtggtggtgagggacattggcgacaccaccatccagctcagctggagccgtggcttcgacaaccacagccccatcgctaagtacaccctgcaagctcgcactccacctgcagggaagtggaagcaggttcggaccaatcctgcaaacatcgagggcaatgccgagactgcacaggtgctgggcctcaccccctggatggactatgagttccgggtcatagccagcaacattctgggcactggggagcctagtgggccctccagcaaaatccggaccagggaagcagccccctcggtggcaccctcaggactcagcggaggaggtggagcccccggagagctcatcgtcaactggacgcccatgtcacgggagtaccagaacggagacggcttcggctacctgctgtccttccgcaggcagggcagcactcactggcagaccgcccgggtgcctggcgccgatgcccagtactttgtctacagcaacgagagcgtccggccctacacgccctttgaggtcaagatccgcagctacaaccgccgcggggatgggcccgagagcctcactgcactcgtgtactcagctgaggaagagcccagggtggcccctaccaaggtgtgggccaaaggggtctcatcctcagagatgaacgtgacctgggaacccgtgcagcaggacatgaatggtatcctcctggggtatgagatccgctactggaaagctggggacaaagaagcagctgcggaccgagtgaggacagcagggctggacaccagtgcccgagtcagcggcctgcatcccaacaccaagtaccatgtgaccgtgagggcctacaaccgggctggcactgggcctgccagcccttctgccaacgccacgaccatgaagccccctccgcggcgacctcctggcaacatctcctggactttctcaagctctagtcttagcattaagtgggaccctgtggtccctttccgaaatgagtctgcagtcaccggctataagatgctgtaccagaatgacttacacctgactcccacgctccacctcaccggcaagaactggatagaaatcccagtgcctgaagacattggccatgccctggtacaaattcggaccacagggcccggaggggatgggatccctgcagaagtccacatcgtgaggaatggaggcacaagcatgatggtggagaacatggcagtccgcccagcaccacaccctggcaccgtcatttcccactccgtggcgatgctgatcctcataggctccctggagctctgatcctggaacccctccctctgcgccgcagctggacgccacctccgacggacacagccagccccttcctgctgccaaggtggcctgacactgtgccagagagtggctggttttaaatacctactttaaacagtgccctttttgtaggaggtaggatattttatattctgccgcaggatagaacccacgcaaggattttctttaaattgagaggcaccaggcagtaacttccatgatgacactgacgcctatacctgagctctaggctgcctggagggaaggaacaggcccatgggaagaagggggttttaaaaacatgtcttcaactcagcagagatggccctctgggaccctatacggactccgccacttgagagcagtcctaggcccggcaggaacaccagacatgaacaggttgaagaactggagcgaagtgcacacctcaccatccttcagtctaaggaagaagggcaagccctgggaccaagagctctcccgccttctccctcgagcagcagcaaggaccctgacgctgtccccgataactccctaggggctcctgcctgcccaagcggctgagaaccagcgccccgatgcctgaggctgggagcctgagccccttcagctttgaggggggtgatactccaggctgtttggggtgggagccaaaaagagttgagaggccagggcccttggtggaaaggggcaccagccttggtctgagatagtcacaacccaggtgacgatgccctctcagccaacactgccaacctgaccctgtcatcccgattgacagcgccacttcaggtggctgggtgactaaagggcttgtcttggtggggtctcccacccctccaagacccattctgcacagtccctccagggtttgggcaggagatggccaatcatgcgcccacctctccagtgctgcctgcagtcagctcggcctccccgacctgcagccccagactctgctctcccagcactgactcactcctgcctgggaggggaatgcagcattcatgctgtgtgtcctggtattgggaggtttctgggaagggcagaggataaatgtggccctgcctgctcccaggtatacctaggaccacctggccagatccgctcccagacggccttggactgcttgcatttccccggagaaaaaggggttaataaatgggccatcctttcctgagctctgggtatactaccagtcacagaacgtcagagctggaagaagccttagagctcaacttcttcaagcccctcactttacagatgaggaaatggaggtggtccagagagggtctgggattcccaaggtcacacagcccagaagagatggggctgggttaagaactcgagtcttccacctttctgttcaaggctgtttgtctacccagaggaaggaggcactgctgaatggctatggcctggctaagaaggtgattagtcagtagggtgtgaaaattctacttcaaggggttcggattggtgatcatggggattggcatggctgggttcccgtccaaggtgtgggcagagcttctaccaaacttcaacatggagggctgacttgaagctccctgtccccctcactcttgccccaagaaaagaggccaaagcaagagcagattccctaggcaagagcagcagcacaactaggaaaccccaaagcccatgctccgacaggtggcccttcacagggggcagcgggacaggcatcttgaagggcatatgtcctcggaagctccgagcctgttttctgtagtttatagttagagctctattttgttatggttttttaaacttttaagtcctgctctattttcctgggcaggtttatgttgatgtttacccactacaattttttaaaaatataagctcacatgccttttccctgccacagccaaacccccactgcaccctacccacccacccctagcccaggtcagctttcctggagctggctaatgaaagcctcctcacctcttcccaacccttacaagcaagggtgctaggggctcagctatacgaccattctccctgacagggagtccaaacttggcctagcatccctcctggcccccctctggccacgacttggcctgtgcctggttctctatcagaaaggggatgctgaacaaaacctccttccaagttttatccaattcgttcctcattgcctcgggctgcgtcaggggaagcaggggacaggtgtccagttgctgggccgagggaggagctggtttggcataggacctaaccagtgaagctagaggctacagccactaaacttgcttcaggccaacgatagttactcacaagtaagtaccttaatgctaatgaggtccactaaaaaggggaggaaggcagacctcctgggagacccacgaagggtttttagccagggaaaactgagccccaggaaaacctaaccactgggcaggcagaatttgtttgagggatagaacgacaacaaaataaatgttcctgcagcctgagatttcaggtagagtactgactaaggtttaataagacaataggtgacctgaggacatgcaagcttgtaaaatgcaacagcctcctgctagagtgacttgtacatgagcttgcttgcagaagactagattagatgtttctcaggatcccctcctgcgcaggggttctctgattttcgtgttctctgcccagatgggctgggggagttgagagtgtgcttattttcactgcgatcatgagaccacagttctgggttatctcctctcatacatcaagccccagaggaggcggcaagaggaacagccacaaacaagtactttaccccacagcttagtggccagtaaacaccctggggactaggaaaaggaaccaactgtaggcacctctccagggcctagggagacaagtgtcctctcttctgcatacatttgggctccccttacagagccctttgccctggctctctggtccttgttgctctaacagtccagatgtacacccagcctcagggggaaggcagctctctccagacagagtctcagggcccagcaaggtcaggttatctgctttcattcagggcaacaaatgatacaaatggtgccagggagtggcaaggccatgggggtaggtgggggtgtctttttcttttcataaagtaacaacagacgagactgaggttaaacatcagaaaaaaacctctggaatgaccttcctcattccaggaggccctggaataaggaagaggcttctttctgagggagctttgaggaattttgacagctgttgacatgggatttgggaaaggtgaagctgtgactggaggggcaggagatggtccaagtgtccatccagagatgagactcttagaatcaaagtgttcagcccaggaagtcttggagatcccaccttctgtggccctgcaccttatgggaagccattaagggggctcatctaggaattctggttacagcccagtgctcatcccagcgtatgctgcctctttagggcagccccaagggccagccagcctgtactctgggcaagagcccaaaatggctaggaatgtttgactcccttaatctcttccccagctacagaggaatcttttctctgcctggtctcagaatgggactgccaactggctcattggtgggagacacagtatcctcaaacctgtggccactggcatgacagtggtgctctgtctccctgggtgacacccaccctaggcttcctcctggatgtgatggggattgccagagaggctcttagcataaaaggcattaggtgggcatttttctgtgtgcccccaaaaagctccatggaaacaggcacctggtagctgcggaacacccgtggacttgtgtatatggtcataggctttgggaagacaggacgtaaaggaaaatgagagaaacaaaatgggtcagatagctttggccacagccccaggcagcctttggggcctatgacacttagtgcccttagatgggatacatcttgcctcggccccaagactcctccaacttacccgtcccatccagggcctgcacagcttagagaggctcacagcttggcaaatgctagggcttcatcagaccactgacttgactcagtgtttgttaaaatggaaccactcccgttggcctactgtttctctcctgtacttcttgtaatgatagttatttattgactctggtagcaggcagttcttaaataaagatggtttctcaacctgttggggaagctggcacgagctgtgggtgttatcatcaggctaaagcatacctccttgtcctgttcttcactccagaggcttttatccaagaatttctttaccccccacacagtgaaatataagtaagttacaacatacagtctatattgcttcatccagtcccaggaggagggaaaaattaggccaagatcttaaggcaggtccaagcagagcacaggcaggcatttggctagaatcagttggctttacctaatacagtggcagtaaaca

SEQ ID NO: 192 - DNA, 4246 bp, Artificial Sequence
  CLCA2
attgaacagtccagatatactgatttccagcccatatttcctgcttttaagctcctttggtcttatttccctcttctttctgaaaagttataaaatgaatgaagggcagaatgtttcttgcccaaccatgattcaggaggcagctcagccacagaacaggcaagtgtagcattgcctggaggaaaaggacttgtagaggcaggtcccagatggatccaccccagacttttcaaagaagacacctccttcatcttgtgttctaaaaccttgcaagttcaggaagaaaccatctgcatccatattgaaaacctgacacaatgtatgcagcaggctcagtgtgagtgaactggaggcttctctacaacatgacccaaaggagcattgcaggtcctatttgcaacctgaagtttgtgactctcctggttgccttaagttcagaactcccattcctgggagctggagtacagcttcaagacaatgggtataatggattgctcattgcaattaatcctcaggtacctgagaatcagaacctcatctcaaacattaaggaaatgataactgaagcttcattttacctatttaatgctaccaagagaagagtatttttcagaaatataaagattttaatacctgccacatggaaagctaataataacagcaaaataaaacaagaatcatatgaaaaggcaaatgtcatagtgactgactggtatggggcacatggagatgatccatacaccctacaatacagagggtgtggaaaagagggaaaatacattcatttcacacctaatttcctactgaatgataacttaacagctggctacggatcacgaggccgagtgtttgtccatgaatgggcccacctccgttggggtgtgttcgatgagtataacaatgacaaacctttctacataaatgggcaaaatcaaattaaagtgacaaggtgttcatctgacatcacaggcatttttgtgtgtgaaaaaggtccttgcccccaagaaaactgtattattagtaagctttttaaagaaggatgcacctttatctacaatagcacccaaaatgcaactgcatcaataatgttcatgcaaagtttatcttctgtggttgaattttgtaatgcaagtacccacaaccaagaagcaccaaacctacagaaccagatgtgcagcctcagaagtgcatgggatgtaatcacagactctgctgactttcaccacagctttcccatgaatgggactgagcttccacctcctcccacattctcgcttgtacaggctggtgacaaagtggtctgtttagtgctggatgtgtccagcaagatggcagaggctgacagactccttcaactacaacaagccgcagaattttatttgatgcagattgttgaaattcataccttcgtgggcattgccagtttcgacagcaaaggagagatcagagcccagctacaccaaattaacagcaatgatgatcgaaagttgctggtttcatatctgcccaccactgtatcagctaaaacagacatcagcatttgttcagggcttaagaaaggatttgaggtggttgaaaaactgaatggaaaagcttatggctctgtgatgatattagtgaccagcggagatgataagcttcttggcaattgcttacccactgtgctcagcagtggttcaacaattcactccattgccctgggttcatctgcagccccaaatctggaggaattatcacgtcttacaggaggtttaaagttctttgttccagatatatcaaactccaatagcatgattgatgctttcagtagaatttcctctggaactggagacattttccagcaacatattcagcttgaaagtacaggtgaaaatgtcaaacctcaccatcaattgaaaaacacagtgactgtggataatactgtgggcaacgacactatgtttctagttacgtggcaggccagtggtcctcctgagattatattatttgatcctgatggacgaaaatactacacaaataattttatcaccaatctaacttttcggacagctagtctttggattccaggaacagctaagcctgggcactggacttacaccctgaacaatacccatcattctctgcaagccctgaaagtgacagtgacctctcgcgcctccaactcagctgtgcccccagccactgtggaagcctttgtggaaagagacagcctccattttcctcatcctgtgatgatttatgccaatgtgaaacagggattttatcccattcttaatgccactgtcactgccacagttgagccagagactggagatcctgttacgctgagactccttgatgatggagcaggtgctgatgttataaaaaatgatggaatttactcgaggtattttttctcctttgctgcaaatggtagatatagcttgaaagtgcatgtcaatcactctcccagcataagcaccccagcccactctattccagggagtcatgctatgtatgtaccaggttacacagcaaacggtaatattcagatgaatgctccaaggaaatcagtaggcagaaatgaggaggagcgaaagtggggctttagccgagtcagctcaggaggctccttttcagtgctgggagttccagctggcccccaccctgatgtgtttccaccatgcaaaattattgacctggaagctgtaaaagtagaagaggaattgaccctatcttggacagcacctggagaagactttgatcagggccaggctacaagctatgaaataagaatgagtaaaagtctacagaatatccaagatgactttaacaatgctattttagtaaatacatcaaagcgaaatcctcagcaagctggcatcagggagatatttacgttctcaccccaaatttccacgaatggacctgaacatcagccaaatggagaaacacatgaaagccacagaatttatgttgcaatacgagcaatggataggaactccttacagtctgctgtatctaacattgcccaggcgcctctgtttattccccccaattctgatcctgtacctgccagagattatcttatattgaaaggagttttaacagcaatgggtttgataggaatcatttgccttattatagttgtgacacatcatactttaagcaggaaaaagagagcagacaagaaagagaatggaacaaaattattataaataaatatccaaagtgtcttccttcttagatataagacccatggccttcgactacaaaaacatactaacaaagtcaaattaacatcaaaactgtattaaaatgcattgagtttttgtacaatacagataagatttttacatggtagatcaacaaattctttttgggggtagattagaaaacccttacactttggctatgaacaaataataaaaattattctttaaagtaatgtctttaaaggcaaagggaagggtaaagtcggaccagtgtcaaggaaagtttgttttattgaggtggaaaaatagccccaagcagagaaaaggagggtaggtctgcattataactgtctgtgtgaagcaatcatttagttactttgattaatttttcttttctccttatctgtgcagaacaggttgcttgtttacaactgaagatcatgctatattttatatatgaagcccctaatgcaaagctctttacctcttgctattttgttatatatattacagatgaaatctcactgctaatgctcagagatcttttttcactgtaagaggtaacctttaacaatatgggtattacctttgtctcttcataccggttttatgacaaaggtctattgaatttatttgtttgtaagtttctactcccatcaaagcagctttctaagttattgccttggttattatggatgatagttatagcccttataatgccttaactaaggaagaaaagatgttattctgagtttgttttaatacatatatgaacatatagttttattcaattaaaccaaagaagaggtcagcagggagatactaacctttggaaatgattagctggctctgttttttggttaaataagagtctttaatcctttctccatcaagagttacttaccaagggcaggggaagggggatatagaggtcacaaggaaataaaaatcatctttcatctttaattttactccttcctcttatttttttaaaagattatcgaacaataaaatcatttgcctttttaattaaaaaaaaaaaaaaaaaaaaa

SEQ ID NO: 193 - DNA, 4312 bp, Artificial Sequence
  LCP2
gaaactagctgagtcgttttctgagaagagaccatatttgttcgcagaggaagccgttgctttctgggatctggctacgccagaaaagacatcggctccaacaggggtgttccacagggtagctgggagttggaagagccaagaacgcctccgagctctggatttgagcttctctgcccatgggtgaagcgcccatgctcagcttgtgagcttcttcccgggagagcagccatggcactgaggaatgtgccctttcgctcagaggtcctgggctgggaccccgacagccttgctgactatttcaagaagctcaactataaggactgtgagaaggcagtgaagaagtaccacatcgatggggctcgcttcttgaacctgacagaaaatgacatccagaagttccccaagctccgggtgccgattctcagtaagttaagtcaggaaatcaacaagaacgaagagaggaggagcatcttcacacgcaaaccccaagtcccgcggtttcctgaagagacagaaagccacgaagaggacaatgggggctggtcgtcctttgaagaagacgattatgaaagtcccaatgatgaccaggatggggaggatgatggagactatgagtcccccaatgaggaggaagaggcacccgtggaagatgacgcggattatgagccgccaccctccaatgacgaggaagctctgcagaactccatcctgcctgccaagcctttccccaactccaactccatgtacatcgaccggcccccctctgggaaaaccccccagcagcctcctgtgcccccccagagaccgatggccgccctcccgcccccaccagccggccggaatcactcgccactgcccccaccccagaccaaccacgaagaacccagcagaagcagaaaccacaaaacggcaaagctccctgctccttcaatagacagaagcacgaaacctcccctagatcgttcattagctccgtttgatagagaacccttcacactaggaaagaaaccaccattttctgacaagccctcgattccagcgggaaggtcactcggggagcatttacccaagattcaaaagcctcctttaccaccgaccacggaaagacatgaaaggagcagccccctgccagggaagaagccacctgtgccaaagcatggatggggaccagacagaagagagaatgatgaagatgatgtgcatcagagacctttgccccagccagcactacttcctatgagctccaacactttcccttcaagatctactaagccaagtcccatgaaccctctcccatcctctcacatgcctggagcattctcagaaagtaacagcagttttccacagagtgcctccctgccaccatacttctctcaaggccctagcaacagaccacctatcagagccgaaggcagaaacttccccttgccacttccaaacaaacctcggcccccatcccccgcggaggaagagaattcattaaatgaagagtggtacgtttcttatattacccgaccagaggcagaagctgctcttagaaagataaaccaggatggcacatttctggtcagagacagctctaaaaaaacaacaaccaatccatatgtcctcatggtgttgtacaaagataaagtttacaacatccagatccgttatcagaaggaaagtcaagtttacttgttgggaactggactccgagggaaagaggactttctgtctgtgtcagatattattgactacttcaggaaaatgccacttctgctcattgatgggaaaaaccgaggttccagataccagtgcacattaacgcatgctgcagggtacccatagcaagttatagccgagcaaatgaaccgtcctcctgcctctgttgccaacacgagatcaatcagccttggtcaatggacaaacacttaggactgaactgaacccctccccatgaacacaagggttttatcctttcctttaaaaacagtgtttgaaatgaagactgtcaactatcccataatttatttattcttcttcaatgtttgtaaagtgcatgagtcatgttcacacttgaagtctagtagtgcactgtaataattcattttttaaaagattatttaatgcccatttcaaaatacagtagtttacacagctacagaaacaatttggggcaagttttaaaacactgaaacagtaatagttattggtgtcacataaaactgatttgttttttacagccaaacctctgtcagtcagaggcattcattagttttatacatgtaatttgaaaatcactaaacctcgttttctcagcagcaataatttaagaggcttcaaaaatataatttcactcttatttagtattttttcctgggggcatttttacgtaatttttttatgaaaagacaaatgcatgttgagataacttctgggattaaaatagtcttttgctttacttttttggtttcctaaaacaactttattgacttttagtccatactgttatatttttgtcttaaagaaaatttaaactacaaataccaaaagaaaacattttaaatttagggatgagactttggtgtatcgtgggtctaggtttaatgaacacatctggggttaagttggcatttcttcacatctccacacccacaccaaccatcacagccccccaccaaccttctcccaaccccaaaagcattgtccagggatatagattttaccaaaggcttcctgggaagacgagggagcaacactttagattaaatgtgatcagactttcctattagatatggctcttctgtctcttgttatccccctgacagctctgccataaagtcccttctcctcatccttcccaaacaggctgtataagtgctttgaggtaattaaactctttcctccagtttacaaatatcacttaacaaaaaatataggcattcagccagattaaaaaactggtattcagccaaatagtgacaatcagttgttcttcaagtttttccctttgggaccttggttgttattgcacaacttttattagcaacaatttttggcgtctctgcttaatctacaagttttcgaaatggaaaagagtatcttgcagcttcattttcatgagctaataaaaggggtattggaaggaatctaagaagtcaccattttaaaactgatgatatgttaaaataaggagtatgcagaaggtagagacttttaactgatgataaaaatggtgtttcacaaaatctcatccttaacaaccagaagttctcagtttagggtccaaaacttgggagtttaaggctgaaaaccctgcattcatttacacgtctacacaacgggctattcagcaagtatttacttagtggctcttctgtgttaaacaagtgagctaggtacaaggtagtaaggatagcatacaccataggttctagtatcgagtaagctccacttgtcttgctttgccgtattctatctttacaattcaaaaatatctaaaatgaaggacctgatagatttcaaagcaactatttggtagcgaatcatgtttataaaacaaaccaaagctcattttaagtctattagtggaaagtgccatcaggattaagatgttctgttccatggctatgactgaaatcaatgttgggaagctaatgttttcatgactagcattctctctctgttcaagcaccgacaactccttttggctgggccttgcctcttttggccacagaccttctatatgaccccaggtgcatcagtcacagttgctcagaaccctgctcagtgataaacatcttactaaagctgggtcaatcagggtcactctctggaatgttaaacatgaagcctgagacaagatctctcttttatctggggtccccaaaggcaatgctgtacacttggagctgcctgctgccctgcaactactcccatttaccaattatctggaagaaccagtctacaatagaagacaacgaggccaacacacaaaaacacagtaaaagtatggacaaattagtgggatccctgaaatctattccaactatgtgcttccaagtcacatgactcaataaatgcttcagctggttgagttgtgcttggcgttcactaccaggagagttctgattaataaaaactcattccatcaattaataatttagtagctctctttcaacctgagccaaattcaagcataagctaaaggataagcagtgacccatggccaatttcctatgtcatacacttgccattagtgacgtaagttaagccattcttcaaaacattaaacagccttcaagaacatgaaaaaaaaaaaaaaaaa

SEQ ID NO: 194 - DNA, 2932 bp, Artificial Sequence
  WSB1
gtgcgtcgggaggcgggggcctcgggctgtgacgtcacgtggccgcgcccctgccgcccagatatctccggcgccgcccgccattttgactccagtgtctcgtttgcagtcggcgctttaggggaactgtcttcctccgcaggcgcgaggctgggtacagggtctattgtctgtggttgactccgtactttggtctgaggccttcgggagctttcccgaggcagttagcagaagccgcagcggccgcccccgcccgtctcctctgtccctgggcccgggagggaccaacttggcgtcacgcccctcagcggtcgccactctcttctctgttgttgggtccgcatcgtattcccggaatcagacggtgccccatagatggccagctttcccccgagggtcaacgagaaagagatcgtgagattacgtactataggtgaacttttagctcctgcagctccttttgacaagaaatgtggtcgtgaaaattggactgttgcttttgctccagatggttcatactttgcttggtcacaaggacatcgcacagtaaagcttgttccgtggtcccagtgccttcagaactttctcttgcatggcaccaagaatgttaccaattcaagcagtttaagattgccaagacaaaatagtgatggtggtcagaaaaataagcctcgtgaacatattatagactgtggagatatagtctggagtcttgcttttgggtcatcagttccagaaaaacagagtcgctgtgtaaatatagaatggcatcgcttcagatttggacaagatcagctacttcttgctacagggttgaacaatgggcgtatcaaaatatgggatgtatatacaggaaaactcctccttaacttggtagatcatactgaagtggtcagagatttaacttttgctccagatggaagcttgatcctggtgtcagcttcaagagacaaaactctcagagtatgggacctgaaagatgatggaaacatgatgaaagtattgagggggcatcagaattgggtgtacagctgtgcattctctcctgactcttctatgctgtgttcagtcggagccagtaaagcagttttcctttggaatatggataaatacaccatgatacggaaactagaaggacatcaccatgatgtggtagcttgtgacttttctcctgatggagcattactggctactgcatcttatgatactcgagtatatatctgggatccacataatggagacattctgatggaatttgggcacctgtttcccccacctactccaatatttgctggaggagcaaatgaccggtgggtacgatctgtatcttttagccatgatggactgcatgttgcaagccttgctgatgataaaatggtgaggttctggagaattgatgaggattatccagtgcaagttgcacctttgagcaatggtctttgctgtgccttctctactgatggcagtgttttagctgctgggacacatgacggaagtgtgtatttttgggccactccacggcaggtccctagcctgcaacatttatgtcgcatgtcaatccgaagagtgatgcccacccaagaagttcaggagctgccgattccttccaagcttttggagtttctctcgtatcgtatttagaagattctgccttccctagtagtagggactgacagaatacacttaacacaaacctcaagctttactgacttcaattatctgtttttaaagacgtagaagatttatttaatttgatatgttcttgtactgcattttgatcagttgagcttttaaaatattatttatagacaatagaagtatttctgaacatatcaaatataaatttttttaaagatctaactgtgaaaacatacatacctgtacatatttagatataagctgctatatgttgaatggacccttttgcttttctgatttttagttctgacatgtatatattgcttcagtagagccacaatatgtatctttgctgtaaagtgcaaggaaattttaaattctgggacactgagttagatggtaaatactgacttacgaaagttgaattgggtgaggcgggcaaatcacctgaggtcagcagtttgagactagcctggcaaacatgatgaaaccctgtctctactaaaaatacaaaaaaaaaaaaaattagccaggcgtggtggtgcacacctgtagtcctagctacttgggaggctgaggcaggagaattgcttgaacccaggaggtggaggttgcagtaagccaagatcacaccactgcactccaacctggacaacagagcgagactccatctcaaaaaaaaaaaaaaattgtgttgcctcatacgaaatgtatttggttttgttggagagtgtcagactgatctggaagtgaaacacagtttatgtacagggaaaaggattttattatccttaggaatgtcatccaagacgtagagcttgaatgtgacgttatttaaaaacaacaacaaagaaggcagagccaggatataactagaaaaaggatgtctttttttttttttttactccccctctaaacactgctgctgccttaattttagaaagcagcttactagtttacccttgtggtataaagtattataaattgttgtgaatttgaagaatccgtctactgtattattgctaaatattttgtttatactaagggacaattattttaagaccatggatttaaaaaaaaaaaaaaaaactctgtttctgcaggggatgatattggtgagttgccaaagaagcaatacagcatatctgcttttgccttctgttgtttatcttacctgcagatattaagaatgtatgcattatgtaaaatgctcaattatatatttttgttgagttttttaattaaagacttgtaaaaaaaaaaaaaaaaaaaaaaaaaaaaaaaaaaaaaaaaa

SEQ ID NO: 195 - DNA, 3010 bp, Artificial Sequence
  ZIC2
aatacactttggttctccgcctggctttggactcttctcctcctccacctcctcctcctcctcccgcgccgccgcctcctcctcctcttcctctccgcgccttcgctacgcgcccggccgcccgaggcagatccaggcggcggcggaggcggcgggcgcaggagagcggctcccagggctgaagtggccgccaccaccgccgcctgcgcctggagcccggtggccgccggacgcaccgcgcggatcgggagcgggagtcgaggcggcgcggaggcgcagggctcgcaggggcgggcgggcgcgctggccatgctcctggacgcgggtccgcagttcccggccatcggggtgggcagcttcgcgcgccaccatcaccactccgccgcggcggcggcggcggctgccgccgagatgcaggaccgtgaactgagcctggcggcggcgcagaacggcttcgttgactccgccgccgcgcacatgggagccttcaagctcaacccgggcgcgcacgagctgtccccgggccagagctcggcgttcacgtcgcagggccccggcgcctaccccggctccgctgcggctgccgctgcggccgcagcgctcgggccccacgccgcgcacgttggctcctactctgggccgcccttcaactccacccgggacttcctgttccgcagccgcggcttcggggactcggcgccgggcggcgggcagcacgggctgttcgggccgggcgcgggcggcctgcaccacgcgcactcggacgcgcagggccacctcctcttcccgggcctgccagagcagcacgggccgcacggctcgcagaatgtgctcaacgggcagatgcgcctcgggctgcccggcgaggtgttcgggcgctcggagcaataccgccaggtggccagcccgcggaccgacccctactcggcggcgcaactccacaaccagtacggccccatgaatatgaacatgggtatgaacatggcagcagccgcggcccaccaccaccaccaccaccaccaccaccccggtgcctttttccgctatatgcggcagcagtgcatcaagcaggagctaatctgcaagtggatcgaccccgagcaactgagcaatcccaagaagagctgcaacaaaactttcagcaccatgcacgagctggtgacacacgtctcggtggagcacgtcggcggcccggagcagagcaaccacgtctgcttctgggaggagtgtccgcgcgagggcaagcccttcaaggccaaatacaaactggtcaaccacatccgcgtgcacacaggcgagaaacccttcccctgccccttcccgggctgtggcaaagtcttcgcgcgctccgagaacctcaagatccacaaaaggacccacacaggggagaagccgttccagtgtgagtttgagggctgcgaccggcgcttcgccaacagcagcgacaggaagaagcacatgcacgtccacacctccgataagccctatctctgcaagatgtgcgacaagtcctacacgcaccccagctcgctgcggaagcacatgaaggtccatgagtcctccccgcagggctctgaatcctccccggccgccagctccggctatgagtcgtccacgcccccggggctggtgtcccccagcgccgagccccagagcagctccaacctgtccccagcggcggcggcagcggcggcggcggctgcggcggcggcggccgcggtgtccgcggtgcaccggggcggaggctcgggcagtggcggcgcgggaggcggctcaggcggcggcagcggcagtggcgggggcggcggcggggcgggcggcgggggcggcggcagctctggcgggggcagcgggacagccgggggtcacagcggcctctcctccaacttcaatgaatggtacgtgtgacgggtcggggcctctctccctctccctgtccccaccccagcgcagcagccctccccgcagctagcagcgagggcaccttgtgatcatgttgttaaaattatgaatctgatttttatgatgatgaaaattttaccagcagaaggattttttaaagttttttttttttttttaataataatctaggcatgaagagcaaaaatatcccttccggagtctttgaagctgaaaatataaaacaaataaaaaataaaaaaataaaaacccacaaaaatgttgaaccaaacctccctgctaatctccatgcccacgttctttcccaccctgttcccagtcttctgacaaactgtgtacatagcggactcctcctttctcctccgaggtggttttaaaggctttttggtgtatagaagtttgtccatttgtaaaactccggattgcgttcctccccgccttccgccccttcccttccctaaagtgatgggctttctcttttctctttttagtttacccggtttctttttaagtaatgtggaagaaaatggtttattttgtattgtggtattgaatattgtgttcctttttatgaggcaacctgattgtaaacttcatgtaactatagactggaaaaaatgagccgtgccaaagtctcccttctgtttcttcagcacattgacccatagcacacacatacacaccaccaccaacaacgcttgtgaatgtatttttctgttagctgggtttacatgtgatgttttagtgcttttgcaagttcaatttgttagttcctgtatgaaagattgtgggggaaaaataaacgtcgtgccgttagctttttccgtaataacacccttccttctgtaaatacccgttaccatatttatccatttgtaattaaattatggtattaacttgctacagaggaaacaatatttataaagaatgtttcttaactataaatatgtacaattgtgggcataaactgtttcagattttttatttgaaggttttaagtggtttgatcatttcttgtgatgttttgagagtaatgcatacagaaatataataaaatgtgttgaaactgcatgaacataaaaaaaaaaaa

SEQ ID NO: 196 - DNA, 8495 bp, Artificial Sequence
  TNRC6A
ggcggcggcggtgtcggcggcggcggcggcggcggcggcggcggcggcagcgggtcggtgtagaaaatggcgctggtgcagcggctcgggcctctccccgcggcgctgcggagggcttgaggctcgcgagcctccttcgccgcgccccacttgctcgtgcactttacacacatgagagaattggaagctaaagctaccaaagacgtagaaagaaatcttagcagggatttagtgcaagaagaagaacagttgatggaagaaaagaaaaagaaaaaagacgacaagaaaaagaaggaagctgctcaaaagaaggccactgaacaaaaaatcaaagtgccagaacagataaagcccagtgtaagccagcctcagcctgccaactctaataacggcacttccacagcaaccagcactaataataatgccaagcgagctacagccaacaatcagcagccacagcagcagcagcaacagcagcagccgcagcagcagcagccacagcagcagccacagccgcagccgcagcagcagcagccacagcagcagccacaggccttgcctcggtatcctcgtgaagtacctccacgatttcgccaccaggaacacaaacagcttctaaagaggggtcagcattttcctgttatagcagcaaaccttggatctgctgttaaggtgttaaacagccagtcagaaagcagtgctttaacaaatcaacagccacaaaataacggagaggtgcagaacagcaaaaaccagtcagatataaaccacagtacttcaggatcccattatgaaaattcccagcggggacctgtgtcttctacaagtgattctagcacaaactgtaagaatgctgttgtaagtgacttgtcggaaaaagaagcatggccctcagcccctggcagtgatccggagttggcttcagaatgtatggatgctgattctgcctccagttctgaatcagagagaaacatcactatcatggcttcagggaacacaggtggtgaaaaagatggccttcggaatagcactggacttggttcccaaaacaagtttgtagttggtagcagcagcaataatgtgggccatggaagtagtactgggccatggggtttttcccatggagccataataagcacatgtcaggtctctgtggatgctcctgaaagcaaatctgaaagtagcaacaatagaatgaatgcttggggcactgtaagttcttcatcaaatggagggttaaatccaagcactttgaattcagctagcaaccatggtgcctggccagtattagagaacaatggacttgccctaaaagggcctgtagggagtggtagttctggcattaatattcagtgcagtactataggccagatgcctaacaatcagagtattaactctaaagtgagtggtggttctacccatggtacctggggaagccttcaggaaacttgtgaatctgaagtaagtggtacacagaaggtttcattcagtggtcaacctcaaaatattaccactgaaatgactggaccaaataacactactaactttatgacctctagtttaccaaactccggttcagtgcagaataatgagctgcctagtagtaacacaggggcctggcgtgtgagcacaatgaatcatcctcagatgcaggctccatcaggtatgaatggcacttccctttctcaccttagcaatggagagtcaaaaagtggaggctcttatggtactacatggggtgcctatggttctaattactctggagacaaatgttcaggccctaatggccaagctaatggtgacactgtgaatgcaactctaatgcagcctggcgtaaatggtcctatgggcactaactttcaagttaacacaaacaaaggaggtggtgtgtgggaatctggtgcagcaaactcccagagtacatcatggggaagtggaaatggcgcaaattctggaggaagtcgaagaggatggggaacccctgcacaaaacactggcactaatttacccagcgttgagtggaacaaactgcctagcaatcagcattccaatgatagtgcaaatggcaatggtaagacgtttacaaatggatggaaatctactgaggaagaggatcagggttctgccacatctcagacaaatgagcaaagcagtgtgtgggccaaaacaggaggtacagtggagagcgatggtagtacagaaagcactggacgccttgaggaaaaaggaactggggaaagtcagagtagagacagaagaaaaattgatcagcacacattactccaaagcattgtaaacagaactgacttagatccacgtgtcctgtccaactctggttggggacagactcctattaagcagaatactgcctgggatacagaaacatcacctagaggggaacgaaagactgacaatgggacagaggcctggggaagctctgcaacacagacttttaactcaggggcatgtatagataagactagccctaatggtaatgatacctcatctgtatcagggtggggcgatcccaaacctgctctgaggtggggagattccaaaggctcaaactgccagggggggtgggaagatgattctgctgctacaggaatggtcaagagcaatcagtgggggaattgcaaagaggagaaggctgcatggaatgactcgcaaaagaataaacagggatggggtgatggacaaaaatcaagccaagggtggtctgtttctgccagtgataactggggagaaacttcaaggaataaccattggggtgaggccaataagaaatccagctcaggaggtagtgacagtgacaggtccgtttccggttggaacgaacttggtaaaactagttctttcacttggggaaacaacataaatccaaataattcatcaggatgggatgaatcttctaaacctactccttcccagggatggggagaccctccaaagtctaatcagtctctaggttggggagattcgtcaaagccagtcagctctccagactggaacaagcaacaagacattgttggatcttggggaatcccaccagctacaggcaaacctcctggtacaggctggctggggggacctataccagccccagcaaaagaagaagaacccacaggctgggaggaaccatccccagaatctatacgtcgcaaaatggagattgatgatggaacttcagcttggggagatccaagcaaatacaactacaaaaatgtgaacatgtggaacaaaaacgtcccaaatggcaacagccgttcagaccagcaagcacaggtacatcagctgctaacgcctgcaagtgccatctcaaacaaagaggcaagcagtggctctggctggggtgagccctggggggagccttctactccagccacaactgtggataatggtacttcagcatggggtaagcccatagacagtggtcccagctggggggaacccattgctgcggcatccagcacatccacgtggggctccagctctgttggtccacaagcattaagcaaatctgggccaaaatctatgcaagatggctggtgtggtgatgatatgccattgcctggaaatcgccccactggctgggaagaggaagaggatgtggagattggaatgtggaatagtaattcatctcaagagcttaactcatctttaaattggccaccatatacaaagaaaatgtcatcgaagggtctgagtggcaaaaaaaggagaagggaaaggggaatgatgaaaggtggaaacaaacaagaagaagcgtggataaatccatttgttaaacagttttcaaacatcagtttttcgagagactcaccagaggaaaatgtacaaagcaataagatggacctttctggaggaatgttacaagacaaacgaatggagatagataaacatagcctaaatattggtgattacaatcgaacggtcgggaaaggccctggttctcggcctcagatttccaaagagtcttccatggagcgcaatccttattttgataaggatggcattgtagcagatgaatcccaaaacatgcagtttatgtccagtcaaagcatgaagcttcccccttcaaatagtgcactacctaaccaggcccttggctccatagcagggctgggtatgcaaaacttgaattctgttagacagaatggcaatcccagtatgtttggtgttggaaacacagcagcacaaccccggggcatgcagcagcctccagcacaacctcttagttcatctcagcctaatctccgtgctcaagtgcctcctccattactctcccctcaggttccagtttcattgctgaagtatgcaccaaacaacggtggcctgaatccactctttggccctcaacaggtagccatgctgaaccagctatcccagctaaaccagctttctcagatctcccagttacagcgattgttagcgcagcagcaaagggcgcagagtcagagaagcgtgccttctgggaaccggccgcagcaagaccagcagggtcgacctcttagtgtgcagcagcaaatgatgcaacaatctcgtcaacttgatccaaacctgttggtgaagcagcagactccaccatctcagcagcagccactccatcagccagccatgaagtctttccttgacaatgtcatgccccacactacacctgagctgcaaaaagggccatcaccaataaatgctttcagcaacttccctataggcttgaactcaaacttgaatgtaaatatggatatgaacagtattaaagagccacagtcaagactaaggaagtggacgacagtggacagcatttctgtgaacacatctttggatcaaaactccagcaaacatggtgctatttcaagtggtttcaggctggaagagtctccatttgttccctatgactttatgaacagcagtacttcaccagccagtcctccaggttcaataggagatggctggccacgtgccaaatcgcctaacggctctagcagtgttaattggccaccagaatttcgtcctggtgagccatggaaaggttatccaaacattgaccctgaaactgacccttacgtcactcctggcagtgtcataaacaatctttcaattaatactgtgcgggaagttgaccacctcagggacaggaacagtgggtcatcctcatccttgaacaccacgctgccttcaactagtgcctggtcatccattcgtgcctccaactacaacgttcccctcagcagtacagcacaaagcacttcagccagaaatagtgattccaaattgacatggtctcctggttcagttacaaacacctctctggctcatgagctgtggaaggtccctttgccacctaaaaacatcactgctccgtcccgcccacctccgggactgactggtcagaagccacccttgtctacgtgggataattctccccttcgtataggtggaggatggggaaattctgacgccagatataccccaggttccagctggggtgagagcagctcagggagaataacaaattggcttgttctaaaaaaccttacacctcagatcgatggctcaactctgcgcactctgtgcatgcagcacggcccgctgatcacattccacctgaacctccctcacggaaatgctctggtccgctacagttcaaaagaagaggtagtgaaggcacaaaagtctctgcacatgtgtgtactggggaacactactattcttgctgagtttgccagtgaagaggagatcagtcgtttctttgcacaaagccagtctctgaccccttctcccggctggcagtctctcgggtccagccagagccggctgggctccctcgactgttcccactcattctccagccggaccgatctcaatcactggaatggtgctgggctgtcgggaactaactgtggagaccttcacggcacttcactctgggggaccccgcattattccacaagcctgtggggtcccccaagcagcagcgacccccgaggaattagcagcccatctcccattaacgcttttctttctgttgaccacctgggtgggggtggagagtccatgtaacagtgtagatgcagactcaccgaccgggacctcagacgcgagggaaaggagcactaagtggggctcgccgcctgcagccaggggccgcctgtgggaacagctattctctgcacattttccactttgttttccccaaaacatatcagtttgaatacttgaatcatgcaggccaatattataatgtgaaaaggtatctactctatttacactcccaaatagcgccatacatgctaaaccgtagagaatgagctcgcttgtgtctattcatcatgtttagcctttggattctttttttttttttccttctattcctccccaacccccccccccgcccctttttttctctcttgcaaaaccattttttgggctgataacgtatgagcttttccctttgcactgaatgatgttctctccgtctcatcggcagtatggggggcagctgtcccagtgtcaatgtttactcaagggtgttcttaggaggcgtgcgctctctactatgccttgatgttgcctaccttattgtggtatcgtggagtttaaaagatcaagttaggatgctgacttaggattattaatgaaagtgttgcaccagttttttcatgttgtaaaactaaagaatttcgctctgcagtttgaaaaactgtggccacagctgtgacttgcagcccacctgccacccaggacgggccctgcactttgaataggctttccattttgttttggaggttctcactttgaaccttcttgtttacagatttttttgtttgttttttgagaaaaaaaaatgtttactcttccatcatttaaaaaaaatgtaaaagacaaaaaaaaaatggaggatgatttaaaagatgctttctatctctgggaaaaaggagcagcatttggccatgttcttttgtttttctattcctgtcccaaatcaaagagcatggttctcaggaaaaccagttccccagtttaaaaaaaaaaaaaaaaattccttgtagtttcttagaggaaaaaaagaaaaaccccaacttttagcactgatactacatattgctctgttaaagaattttctctgccaaaaaaaaagaaaaaacaaaaaaacgcttaaagctggagtttgacattctgctttcagatgctgtctttttattagtgagtgatgatggtttgctaataatcaataggtaataattttttgtaatcccatcaagtggctccatatgtttctgctctctcgtgactgtgttaatgtttaactgttgtaccttaaagccgaaatcagtaactatgcatactgtaaccaaggtattgggcttacagagttgtttgttgtataaagaaaattttaaatgttgttgcaaactaacgagttacaccattttaaactttctttcctcccccctttttttgcccacaaatggtattataatgcttgcttagtcaaagaagagagactaaacaagggtaaaaattttaacagtacagaatttgccatcatatcattgccttgattctaactgtttgtgtcctaagatgcaaaagaagtcagtggcttttaactgtttacaaatagaatgtgattgtaaaatgtacagtttggttgtgtttgaattatgaaatttcttcagatataataaaccatgactttttggctgctcaacattaattgtctcctttttgtgaatttatttgtaggctcttttttataatgaaagtttcaaagttgctatgtatgagggttctcatagagcaaccgattaaaaatctaagcaaatatttgaacattttatctgaactcatcacaatttcaccctgaaataatgtgagaacaatgggaaactgtagcttgctccttcccaccctctctgagcatctttgggatcttgttgctcaaaactcttctgtgacttcatcttccccaccatttgtgcccatctcaagcctcagcaagaaaccatgtggaacatgaagcttaatgacttgacagtgtactagtgttaaactctcatacctctgttacaaagcgagaaacgccacacccggactggccttttcttcccccttcacggccctcgcttctccctgcaggagctcgggggcgaaacctgtgtatggatttcagtgtatgacttcagatcatgctccaacttgccaggtgtgagctaatgttgtcggacaccttactataagcaaatgttattcagtgcgttcaatgtatattgacttccatactggtttttccaaaaaccaaaggtagctttgaaaaaccatgtctggaaatgtttggagcgttaagctgattgaccttctgaccttggggctttgagtagtatataattcataactgcgttaattgtattgttaaagtgtttgggagttttttgcgcttgttatgtggaaataaagtgtttgatttaaaattttttaaaaaaaaaaaaaaaaaa

SEQ ID NO: 197 - DNA, 6169 bp, Artificial Sequence
  ATP8B1
agaggcacctccccgagcggagaaaccagtttggccggtccggcggagcggaggcaaaagggcggctgcagaggaagggtgcacggacgcggggcggggaaaggcgggggagccactagcgagccgcgagagccggaggtgccgccgccaactagacacgcttccccgggcccccggccagcccccgtgcgccatgcagcgctagcgcggcggccagggctggggccgggcgggcggcggcagcggccaggtgcgcagcgagcgctccgagcggcgcgcaccaggcggatgccccagccggggcccagcgaacgccaggtagttccaatttgccagcagaatgagtacagaaagagactcagaaacgacatttgacgaggattctcagcctaatgacgaagtggttccctacagtgatgatgaaacagaagatgaacttgatgaccaggggtctgctgttgaaccagaacaaaaccgagtcaacagggaagcagaggagaaccgggagccattcagaaaagaatgtacatggcaagtcaaagcaaacgatcgcaagtaccacgaacaacctcactttatgaacacaaaattcttgtgtattaaggagagtaaatatgcgaataatgcaattaaaacatacaagtacaacgcatttacctttataccaatgaatctgtttgagcagtttaagagagcagccaatttatatttcctggctcttcttatcttacaggcagttcctcaaatctctaccctggcttggtacaccacactagtgcccctgcttgtggtgctgggcgtcactgcaatcaaagacctggtggacgatgtggctcgccataaaatggataaggaaatcaacaataggacgtgtgaagtcattaaggatggcaggttcaaagttgctaagtggaaagaaattcaagttggagacgtcattcgtctgaaaaaaaatgattttgttccagctgacattctcctgctgtctagctctgagcctaacagcctctgctatgtggaaacagcagaactggatggagaaaccaatttaaaatttaagatgtcacttgaaatcacagaccagtacctccaaagagaagatacattggctacatttgatggttttattgaatgtgaagaacccaataacagactagataagtttacaggaacactattttggagaaacacaagttttcctttggatgctgataaaattttgttacgtggctgtgtaattaggaacaccgatttctgccacggcttagtcatttttgcaggtgctgacactaaaataatgaagaatagtgggaaaaccagatttaaaagaactaaaattgattacttgatgaactacatggtttacacgatctttgttgttcttattctgctttctgctggtcttgccatcggccatgcttattgggaagcacaggtgggcaattcctcttggtacctctatgatggagaagacgatacaccctcctaccgtggattcctcattttctggggctatatcattgttctcaacaccatggtacccatctctctctatgtcagcgtggaagtgattcgtcttggacagagtcacttcatcaactgggacctgcaaatgtactatgctgagaaggacacacccgcaaaagctagaaccaccacactcaatgaacagctcgggcagatccattatatcttctctgataagacggggacactcacacaaaatatcatgacctttaaaaagtgctgtatcaacgggcagatatatggggaccatcgggatgcctctcaacacaaccacaacaaaatagagcaagttgattttagctggaatacatatgctgatgggaagcttgcattttatgaccactatcttattgagcaaatccagtcagggaaagagccagaagtacgacagttcttcttcttgctcgcagtttgccacacagtcatggtggataggactgatggtcagctcaactaccaggcagcctctcccgatgaaggtgccctggtaaacgctgccaggaactttggctttgccttcctcgccaggacccagaacaccatcaccatcagtgaactgggcactgaaaggacttacaatgttcttgccattttggacttcaacagtgaccggaagcgaatgtctatcattgtaagaaccccagaaggcaatatcaagctttactgtaaaggtgctgacactgttatttatgaacggttacatcgaatgaatcctactaagcaagaaacacaggatgccctggatatctttgcaaatgaaactcttagaaccctatgcctttgctacaaggaaattgaagaaaaagaatttacagaatggaataaaaagtttatggctgccagtgtggcctccaccaaccgggacgaagctctggataaagtatatgaggagattgaaaaagacttaattctcctgggagctacagctattgaagacaagctacaggatggagttccagaaaccatttcaaaacttgcaaaagctgacattaagatctgggtgcttactggagacaaaaaggaaactgctgaaaatataggatttgcttgtgaacttctgactgaagacaccaccatctgctatggggaggatattaattctcttcttcatgcaaggatggaaaaccagaggaatagaggtggcgtctacgcaaagtttgcacctcctgtgcaggaatctttttttccacccggtggaaaccgtgccttaatcatcactggttcttggttgaatgaaattcttctcgagaaaaagaccaagagaaataagattctgaagctgaagttcccaagaacagaagaagaaagacggatgcggacccaaagtaaaaggaggctagaagctaagaaagagcagcggcagaaaaactttgtggacctggcctgcgagtgcagcgcagtcatctgctgccgcgtcacccccaagcagaaggccatggtggtggacctggtgaagaggtacaagaaagccatcacgctggccatcggagatggggccaatgacgtgaacatgatcaaaactgcccacattggcgttggaataagtggacaagaaggaatgcaagctgtcatgtcgagtgactattcctttgctcagttccgatatctgcagaggctactgctggtgcatggccgatggtcttacataaggatgtgcaagttcctacgatacttcttttacaaaaactttgcctttactttggttcatttctggtactccttcttcaatggctactctgcgcagactgcatacgaggattggttcatcaccctctacaacgtgctgtacaccagcctgcccgtgctcctcatggggctgctcgaccaggatgtgagtgacaaactgagcctccgattccctgggttatacatagtgggacaaagagacttactattcaactataagagattctttgtaagcttgttgcatggggtcctaacatcgatgatcctcttcttcatacctcttggagcttatctgcaaaccgtagggcaggatggagaggcaccttccgactaccagtcttttgccgtcaccattgcctctgctcttgtaataacagtcaatttccagattggcttggatacttcttattggacttttgtgaatgctttttcaatttttggaagcattgcactttattttggcatcatgtttgactttcatagtgctggaatacatgttctctttccatctgcatttcaatttacaggcacagcttcaaacgctctgagacagccatacatttggttaactatcatcctgactgttgctgtgtgcttactacccgtcgttgccattcgattcctgtcaatgaccatctggccatcagaaagtgataagatccagaagcatcgcaagcggttgaaggcggaggagcagtggcagcgacggcagcaggtgttccgccggggcgtgtcaacgcggcgctcggcctacgccttctcgcaccagcggggctacgcggacctcatctcctccgggcgcagcatccgcaagaagcgctcgccgcttgatgccatcgtggcggatggcaccgcggagtacaggcgcaccggggacagctgatcccttacccccaggctgggatgcggccacaaagcacgtctatttttttatgaaagactctcaggactttgtgtgtgtgtgtgaattgcattcatcacaaagatattgaagacaataaataatctttataacaaactccttgggttggactattaaacaatagcagagccaagaaataggacttttaaaagtcctattattcggccgggcgtggtggctcaggtctgtaatcccagcactttaggaggctgaggaggggagatcacctgaggccaggagttcgagaccagcccagccaacatggtgaaaccctgtctctaccataaattaaaaattagccgggcttggtggtgggcacccgtaatcccacctatttgagaagctgaagcagaagaatcgcttgaacctgggagatggaggttacagtgagccgagattgcgccactgcactccagcctgggtgacagagcaagactctgtcttaagaaaaatttaaaaataggccgggcatggtggctcatgcctgtcatcctagcactttgggaggccaaggcaggtggatcacttgaggtcaggagaccagcccggccaacatggtgaaaccccatctctactaaaaatacaaaaattagctggaaatcgcttgaacctgggaggtggaggttccagtgagccgagatcgtggcactgcactccaacctgagcaacagagtgagacaccagctcaaaaaaaattttttaataataataaaagtcctattattcaactggttatgtacattatggttgaaagggaacgttttaatccagtctcaatccagggcaatagaattacaaagcatgttgtatttcagttcaaatggtattgtattataaaattacagttacattttcctttcggtgatcttcagcataatttcccagaggcccctttttcctccctataggccatcttattaacagattttaaaatttatagtaatgacaaatgacttatcagtgttcatcatctgaaagctaagtggttcgttcaatcactttttcaaagttgatagtagattgcatggtttcatgtttcctcatattggtttattaattctatttaatcaaggaaaataacttcagattccataaagtttcagtttatttttagtttactactaggtgagatagcacattacatacttttactatcaaatattattttagcagcttcccatagtaccaaatgatttgattccctactctcattttttaaagcatataaatatttatgggcttaaaaagggggtttttaaaaactgaggatatcagtaataaattgcagaatattttgcaaagctttcttttggaaagcaaacttttgtgcctgcctatatgcaaagtattttatcagggacttgaacaaagacctcactctttttcacttgtcttatgtcgagagaaaaggttattggcagccacattcctaagactggggaatggtgtgtccttttaaatttgaagataactttaggtaattatggaaactcctcaaagaggagaaagtaatttttttccagacatttttctcattctgtgtctttcacacactagtttccatagttcgagaattctgttttttaccattgggctgtgaatgttcacaatatcagtcctgttgaattcctatgaggtaatcacaatgtgtatatgttcattttctaggtatgataaaagaatgtatggctttttattctgtggaagtaaaatcctgaacgtttacaacttttccttaacttgtaaataaaaaattgtaagttttttctttttttacagaaaacttagcttgtgtaattctgttagtttcagatttctctcctgtttttgcaaattgtgggaaagattgacaatgcaaatgtgtcaaagacatactgttgggtgcaatattaacaattttaaatgcaaatttctttggataaattatttctatattctgtaaatctgagatttaatgtatattttgtttaaaaaaatgatttagtaaaatctttgaaaagtatgatcttctaaagtatttaaaaaaaaaaaaaa

SEQ ID NO: 198 - DNA, 5614 bp, Artificial Sequence
  GPR37
ggctccgcgcctccgcccttgttccctcccagctcctccgagtggaagccgctacaaatggcttgaatgaaacgtgtgtgggtttagtgagtggtgaaccaccaggggatcccgtctccccacaaaccagtatctctccgaggaggaggcgaaggagtgggaggaggcaacgagccgagagtcgagcttcgcgggcgcgcgcagcggctggagcgcgggggcgaggccgggccacctccccttcccggccgcgcactgcctggcccgcggcggttccaggcaccacccttcccgtccgggctgagcccgctgtggcagtgactagctcccgcggctagcggcactgtccaccgacgagcggcgccctcttctcccccttctccccacgatttccttctctgcggcggcacgccgtccagcagcctgcttcgccccgtcgtcaactttgagctggaggagaagcaactttggcagtggccgcggggttggaatcccgcttctcctcggcagcagtaggctcgcaagtcgctggggttaggtggggcaagagtttcgccggcgcatcagcgctgcttcggactgtttgcaacgtgtttccagcgagctgggagcggggttgtgactgcgagtcgtctgggggagggggacttgtttttcttttcctctagagacctcggcttgcaactggatcaaacgctgtcgaaaggatgtaaataggcagagcaactgttaccaagaaggccaccacccccacccaaaggcagtgaggagtgtggggcttcgtctgggctcccccgagtctcaacagtaatcaacagtcaggtgttgattgcaacttttcaaggtcagccaccgggagtagcctattccctctaggaaccttggagggcataccttgctgggactcaacttggctgagaaatgcacaagatgccaaaggaggaaggattatagggggcgtgtgtgtgacccccaagaccgatcttccgctatcaccctaatctccggttccccgctacccgggcgggggtgagtatgtgacatgtgcctaactctcagcagcaacttcggcagcaggtgtcgatcctaactaagcaggagctgcggctgccgggtgtgccctcaccaagccatgcgagccccgggcgcgcttctcgcccgcatgtcgcggctactgcttctgctactgctcaaggtgtctgcctcttctgccctcggggtcgcccctgcgtccagaaacgaaacttgtctgggggagagctgtgcacctacagtgatccagcgccgcggcagggacgcctggggaccgggaaattctgcaagagacgttctgcgagcccgagcacccagggaggagcagggggcagcgtttcttgcgggaccctcctgggacctgccggcggccccgggccgtgacccggctgcaggcagaggggcggaggcgtcggcagccggacccccgggacctccaaccaggccacctggcccctggaggtggaaaggtgctcggggtcaggagccttctgaaactttggggagagggaaccccacggccctccagctcttccttcagatctcagaggaggaagagaagggtcccagaggcgctggcatttccgggcgtagccaggagcagagtgtgaagacagtccccggagccagcgatcttttttactggccaaggagagccgggaaactccagggttcccaccacaagcccctgtccaagacggccaatggactggcggggcacgaagggtggacaattgcactcccgggccgggcgctggcccagaatggatccttgggtgaaggaatccatgagcctgggggtccccgccggggaaacagcacgaaccggcgtgtgagactgaagaaccccttctacccgctgacccaggagtcctatggagcctacgcggtcatgtgtctgtccgtggtgatcttcgggaccggcatcattggcaacctggcggtgatgtgcatcgtgtgccacaactactacatgcggagcatctccaactccctcttggccaacctggccttctgggactttctcatcatcttcttctgccttccgctggtcatcttccacgagctgaccaagaagtggctgctggaggacttctcctgcaagatcgtgccctatatagaggtcgcttctctgggagtcaccactttcaccttatgtgctctgtgcatagaccgcttccgtgctgccaccaacgtacagatgtactacgaaatgatcgaaaactgttcctcaacaactgccaaacttgctgttatatgggtgggagctctattgttagcacttccagaagttgttctccgccagctgagcaaggaggatttggggtttagtggccgagctccggcagaaaggtgcattattaagatctctcctgatttaccagacaccatctatgttctagccctcacctacgacagtgcgagactgtggtggtattttggctgttacttttgtttgcccacgcttttcaccatcacctgctctctagtgactgcgaggaaaatccgcaaagcagagaaagcctgtacccgagggaataaacggcagattcaactagagagtcagatgaactgtacagtagtggcactgaccattttatatggattttgcattattcctgaaaatatctgcaacattgttactgcctacatggctacaggggtttcacagcagacaatggacctccttaatatcatcagccagttccttttgttctttaagtcctgtgtcaccccagtcctccttttctgtctctgcaaacccttcagtcgggccttcatggagtgctgctgctgttgctgtgaggaatgcattcagaagtcttcaacggtgaccagtgatgacaatgacaacgagtacaccacggaactcgaactctcgcctttcagtaccatacgccgtgaaatgtccacttttgcttctgtcggaactcattgctgaaggacagtacttggttgggtcagatttatttgtttgattttcatatcccgtgaaagtttttaattcatatttttccttatagggaaaaatgcaaaaaagaaacaataaagaaagaaatattaactactgtagaactgattttacaaattaatatttgtgctttgaaaaaaagtttctatttagttatttaagaagaatgagaaggccaatagttttagattattttatctggtatggtgctaatattttatttgaaaaaagttactgcaacttaacttaaaattgctaacgttttttcttcttttaaaaatacaattattgtatattgattatagcaatgtgattttgtaggttattttatatttgagttgtgattgaaagtatgttgtatatggtattgtgagatgatttgtacttggaagcattcacaaagtagcaccaaataaattacactttattctttaatgtcattgtcaatctacttttaaccaatattcaataaatcttctaattgccttaaagatacaattactggttctatgcacaatttaaaaccggccttactgttttataacgtattttcttttaaggcaggtaatcattatgttataaagaagtttttctaatagcagtattttatatgcatgattcataaaactatgttgtatgttaaaacaaagctgtatttttaatattcaggtatagatgtcaaattacttctgaatacttataaaatatgaataaatagcagagtaggaagaaagtttcttttttaaaaaattcacctctgaactagcacatagagctacagattttcccttggggaattatgggcagaatcaagaattttaaaatgcagttgtcatctgatttcctctgaacactgacctttgaagctttgtgaatcctacgtaaagcactctgagttctaatttttctccttttgaaaaataaacttgatgaaatctatacaacttaatttctttaagtgcaatgaaagtataggagtggaataataaaatatttatatatttttattagaacattctacctttaacttgatacttcataaactctgaataaaaaaacctaacctcctccattgggaatatttgaatcccctcttttgcctcttctggagtttaaaatgcagcagttgtgtaggatgcttgctgtgtgggacacatgtctaactcaggtggcagagaccatgacctagtgacacagtgatatttaaaagctaccaaagaagatgtgtagttggatgtctttgtcttcagaaaaatcttgttatagagaacccagttttcttgctgggaaaacgtagtttctgcttgttgatttctgttctactcggcataagtaagtcagtattcctttttccaaattataacatgatgttatttaaaaatcattaaagagattggtgcaggtgaaacttaaatggcagtgcccaggctatctcctttttcccagtccaatacttttcaaaggggtttttccctccattgtgtgtattctgtgggatctgcaggagaattcaaacaaggtgcccttgtcttcttgtagatccctgtaataggtctttggaaaatttctcaagaggacacctgagctaggttttggctgctgagcagaacagcaactgtgattccatagtgtctctcctgatatttagtcactttataaatcaaggaacaattgagcatgtcatgtggaaaagattctatcctattacctgagtaactaaaggtaaataggtcacagcctcagaccttacagaatcaggcagggatgacatggatgggaaggaataaaataaatacatagacaactatgatataagctggggcttgttaggtgcctcaggaagatgtgaagttctgcgatactttggaatagagggaatgcttatagggttagaagagagcatgaaaggctttatgagataactggatgagtgggcttttagaaggagctgatgaaagatggtgtgaggagtggacacttcaggaggagagagctaatttataaaggaatagaagaagaaatcagtgggtgtgattgaagaataaacagcccagtttgacttctgtgctacgtgtgcatagcagccttgtgggaaatattaaagaaaatatgcaccaaggccatctaataataggaccatgttttgaaagatgtttacatggtggtgcttcaggaaatggggctttgcttttaaggtttttgagtatggagaaatagtatcccagctctgcaataggaagatcaacttgcaaacagtttaaataggctggtaggggacagtctgatcatgaaaaagcaactaggaagctattataagagattgaaccacaatggaggcagcaggaacttaaatttcttttttcatttatacttgcctttcaactttttgtagttgcaacatgtactttcttattgaatcctacctctgtcaaagtggaaactttgataactcaaattgtcccaagtataaagtgatttcaaagttttctcatagtcgtcttgtgtttttcacaaaaaccaatttctataatatacttttaaaaaattgttaatcatttctgttcaacatttcttcagtctggatcttatccaatgtcttacgctcctcgt

SEQ ID NO: 199 - DNA, 1876 bp, Artificial Sequence
  COQ2
ggaacacttattctattttacagaataaggtgttgcccgattctattttttgtttgtttcctcagagaccccgttctgagtgttgcccgataatggaaccacaaagtcaatcaagatcgagttgtaaaaaattacaactaaatttattgtaatttttttgccttttgccaatagaaatccctttttcattaagtattcctccctagagtaagcgaccacgatgaccccaatttcacaagtaaggatgaggaaaggttctgcccacaccgccgcccagcctggcagactaggattgcatcctgcgggtgccactgcgcatgcctgccggggaatgacgtcaatccgagctcgtcccggcctcaccagcgccatgctgggctcgcgagccgcggggttcgcgcggggcctgcgggctgtggcactggcgtggctgccgggctggcggggccgctccttcgccctggcgcgtgcggcaggcgcgccccacggtggtgacttgcagccccccgcctgtcccgagccgcgcgggcgccagctcagtttgtccgcggcggcggtggtggactctgcgccccgccccctgcagccgtacttgcgcctcatgcggttggacaagcccattggaacctggcttctgtatttaccatgtacctggagcattggtttggcagctgaaccaggttgttttccagattggtacatgctctccctctttggcactggagctattctgatgcgtggagcaggctgtactattaatgacatgtgggaccaggactatgataaaaaggttacaagaacagccaatcgtccaatagccgctggagacatttcaacttttcagtcctttgtttttcttgggggacagctaaccctggcactgggtgttcttctgtgtctaaattactacagtatagctctgggagcaggatccttacttcttgtcatcacctacccactaatgaaaagaatttcatactggcctcaactagccttgggcttgacatttaattggggagcgttacttggatggtctgctatcaagggttcctgtgatccatctgtttgcctgcctctttatttttctggagttatgtggacactaatatatgatactatttatgcccatcaggacaaaagagatgatgttttgattggtcttaagtcaacggctctgcggttcggagaaaataccaagccgtggctcagcggcttcagtgttgcaatgctgggggcactgagcctagtgggtgtgaacagtggacagactgctccctactacgctgccctgggtgctgtaggagcccatctgactcaccagatttacactctagacatccacagacctgaggattgttggaataaatttatctccaaccgaacactgggactaatagtttttttagggattgtccttgggaatttgtggaaagaaaagaagacagacaaaacaaagaagggtatagagaataaaatagaaaattaatgaatgaaatttatctaggaatttttaaaacattttttacaaaatataattagatttgaatacaaaatctgatacaatatgttaaagaattaagaacctgaagatgaagatttagagcatatttacctggattttacttatttgctagcaaaattcccccttgtcacagaaaccagggactcttcaggatttgagatggccttgagtattttagttgatacattcttctgcccattataattctcacctgaagttatggggattgcacgggttttggcactttagaaaaagcctgatgtgggtcttacataaatgaatgtctgtataagaaaatggactcttttttttagggaaaaataaaagcaactatgggaaaaaaaaaaaaaaaaa

SEQ ID NO: 200 - DNA, 473 bp, Artificial Sequence
  APOA2
aggcacagacaccaaggacagagacgctggctaggccgccctccccactgttaccaacatgaagctgctcgcagcaactgtgctactcctcaccatctgcagccttgaaggagctttggttcggagacaggcaaaggagccatgtgtggagagcctggtttctcagtacttccagaccgtgactgactatggcaaggacctgatggagaaggtcaagagcccagagcttcaggccgaggccaagtcttactttgaaaagtcaaaggagcagctgacacccctgatcaagaaggctggaacggaactggttaacttcttgagctatttcgtggaacttggaacacagcctgccacccagtgaagtgtccagaccattgtcttccaaccccagctggcctctagaacacccactggccagtcctagagctcctgtccctacccactctttgctacaataaatgctgaatgaatcc

SEQ ID NO: 201 - DNA, 2423 bp, Artificial Sequence
  ENO2
acccgcgctcgtacgtgcgcctccgccggcagctcctgactcatcgggggctccgggtcacatgcgcccgcgcggccctataggcgcctcctccgcccgccgcccgggagccgcagccgccgccgccactgccactcccgctctctcagcgccgccgtcgccaccgccaccgccaccgccactaccaccgtctgagtctgcagtcccgagatcccagccatcatgtccatagagaagatctgggcccgggagatcctggactcccgcgggaaccccacagtggaggtggatctctatactgccaaaggtcttttccgggctgcagtgcccagtggagcctctacgggcatctatgaggccctggagctgagggatggagacaaacagcgttacttaggcaaaggtgtcctgaaggcagtggaccacatcaactccaccatcgcgccagccctcatcagctcaggtctctctgtggtggagcaagagaaactggacaacctgatgctggagttggatgggactgagaacaaatccaagtttggggccaatgccatcctgggtgtgtctctggccgtgtgtaaggcaggggcagctgagcgggaactgcccctgtatcgccacattgctcagctggccgggaactcagacctcatcctgcctgtgccggccttcaacgtgatcaatggtggctctcatgctggcaacaagctggccatgcaggagttcatgatcctcccagtgggagctgagagctttcgggatgccatgcgactaggtgcagaggtctaccatacactcaagggagtcatcaaggacaaatacggcaaggatgccaccaatgtgggggatgaaggtggctttgcccccaatatcctggagaacagtgaagccttggagctggtgaaggaagccatcgacaaggctggctacacggaaaagatcgttattggcatggatgttgctgcctcagagttttatcgtgatggcaaatatgacttggacttcaagtctcccactgatccttcccgatacatcactggggaccagctgggggcactctaccaggactttgtcagggactatcctgtggtctccattgaggacccatttgaccaggatgattgggctgcctggtccaagttcacagccaatgtagggatccagattgtgggtgatgacctgacagtgaccaacccaaaacgtattgagcgggcagtggaagaaaaggcctgcaactgtctgctgctcaaggtcaaccagatcggctcggtcactgaagccatccaagcgtgcaagctggcccaggagaatggctggggggtcatggtgagtcatcgctcaggagagactgaggacacattcattgctgacctggtggtggggctgtgcacaggccagatcaagactggtgccccgtgccgttctgaacgtctggctaaatacaaccagctcatgagaattgaggaagagctgggggatgaagctcgctttgccggacataacttccgtaatcccagtgtgctgtgattcctctgcttgcctggagacgtggaacctctgtctcatcctcctggaaccttgctgtcctgatctgtgatagttcaccccctgagatcccctgagccccagggtgcccagaacttccctgattgacctgctccgctgctccttggcttacctgacctcttgctgtctctgctcgccctcctttctgtgccctactcattggggttccgcactttccacttcttcctttctctttctctcttccctcagaaactagaaatgtgaatgaggattattataaaagggggtccgtggaagaatgatcagcatctgtgatgggagcgtcagggttggtgtgctgaggtgttagagagggaccatgtgtcacttgtgctttgctcttgtcccacgtgtcttccactttgcatatgagccgtgaactgtgcatagtgctgggatggaggggagtgttgggcatgtgatcacgcctggctaataaggctttagtgtatttatttatttatttattttatttgtttttcattcatcccattaatcatttccccataactcaatggcctaaaactggcctgacttgggggaacgatgtgtctgtatttcatgtggctgtagatcccaagatgactggggtgggaggtcttgctagaatgggaagggtcatagaaagggccttgacatcagttcctttgtgtgtactcactgaagcctgcgttggtccagagcggaggctgtgtgcctgggggagttttcctctatacatctctccccaaccctaggttccctgttcttcctccagctgcaccagagcaacctctcactccccatgccacgttccacagttgccaccacctctgtggcattgaaatgagcacctccattaaagtctgaatcagtgc

SEQ ID NO: 202 - DNA, 782 bp, Artificial Sequence
  CST1
gggctccctgcctcgggctctcaccctcctctcctgcagctccagctttgtgctctgcctctgaggagaccatggcccagtatctgagtaccctgctgctcctgctggccaccctagctgtggccctggcctggagccccaaggaggaggataggataatcccgggtggcatctataacgcagacctcaatgatgagtgggtacagcgtgcccttcacttcgccatcagcgagtataacaaggccaccaaagatgactactacagacgtccgctgcgggtactaagagccaggcaacagaccgttgggggggtgaattacttcttcgacgtagaggtgggccgcaccatatgtaccaagtcccagcccaacttggacacctgtgccttccatgaacagccagaactgcagaagaaacagttgtgctctttcgagatctacgaagttccctgggagaacagaaggtccctggtgaaatccaggtgtcaagaatcctagggatctgtgccaggccattcgcaccagccaccacccactcccaccccctgtagtgctcccacccctggactggtggcccccaccctgcgggaggcctccccatgtgcctgcgccaagagacagacagagaaggctgcaggagtcctttgttgctcagcagggcgctctgccctccctccttccttcttgcttctaatagccctggtacatggtacacacccccccacctcctgcaattaaacagtagcatcgcctccctctgaaaaaaaaaaaaaaaaaaaaaaa

SEQ ID NO: 203 - DNA, 698 bp, Artificial Sequence
  TNNC2
tcatctttgggtggtggagtgcaaaggaggcgacctgcaacagaggagtcccggtcaccagcaaccatgacggaccagcaggctgaggccaggtcctacctcagcgaagagatgatcgctgagttcaaggctgcctttgacatgtttgatgctgatggtggtggggacatcagcgtcaaggagttgggcacggtgatgaggatgctgggccagacacccaccaaggaggagctggacgccatcatcgaggaggtggatgaggacggcagcggcaccatcgacttcgaggagttcttggtcatgatggtgcgccagatgaaagaggacgcgaaagggaagagcgaggaggagctggccgagtgcttccgcatcttcgacaggaatgcagacggctacatcgacccggaggagctggctgagattttcagggcctccggggagcacgtgacggacgaggagatcgaatctctgatgaaagacggcgacaagaacaacgacggccgcattgacttcgacgagttcctgaagatgatggagggcgtgcagtaaggagtggacagtcgcctctaccaagatcgcgtgtccctagggtgtgggagactccgccctgccgggtccccaccagggaggcgcgaccccttgtgggtctttgtctggaaggaataaaagcaaatgttccaaaaaaaaaaaaaaaaaaa

SEQ ID NO: 204 - DNA, 4682 bp, Artificial Sequence
  ELAVL3
ggacttgaacacacgggaccggacaggaccgaccgaggggcggcggcgaaaggcagagcgccgcgatctctgtcgggaagcgcaacctccccgggccccgcggggccgcgcagggggcgtcctcaaccccgcgcccgctccctctttccatcccctgccgcccgcaggccaccccggggcccggccatccgcgcgcgcatccccgggttcgggcccgtccctggccctcgagggagccgccgccttcatcgccacatctgcagcggccgcaccagaggccgcccgggcgggaccccagcgtgagcatcgggcgcccccctaggagtgcaccacccccggagcccccctcaacacggaccgcgcccgccgggcacacaagaatggtcactcagatactgggggccatggagtctcaggtgggggggggcccggccggcccggccctgcccaacgggccactccttggtacaaatggagccactgacgacagcaagaccaacctcatcgtcaactacctgccccagaacatgacccaggatgagttcaagagtctcttcggcagcattggcgacatcgagtcctgcaagttggttcgggacaagatcacagggcagagccttggctacgggtttgtgaactattctgaccccaatgatgcagacaaagccatcaacaccctcaacggcctcaaattacagacgaagaccatcaaggtgtcctatgccagacccagttcagcatccatccgggatgctaacctgtacgtcagcgggctccccaagaccatgagccagaaagagatggagcagctcttctcccagtacggccgcatcatcacgtcccgcatcctggtggaccaggtcacaggtgtctctcggggtgtgggattcatccgctttgacaagaggattgaggccgaagaggctatcaaaggactgaatgggcagaagccgctgggcgcagctgagcccatcacagtcaagttcgcgaacaacccaagtcagaagacggggcaggcgctgctcacccacctctaccagtcatccgcccggcgctacgcaggccccctacaccatcagacccagcgtttccggctggacaatttgctcaacatggcctacggcgtcaagagtcccctgtcgctcatcgccaggttctcgccgatcgccatcgatggtatgagcggcctggcgggcgtgggcctgtcggggggcgcggcgggcgccggctggtgcatcttcgtgtacaacctgtcaccggaggcagacgagagcgtgctgtggcagctgttcgggccttttggggcagtcaccaacgtcaaggtcatccgtgatttcaccaccaacaagtgcaagggtttcggcttcgtgaccatgaccaactatgacgaggcggccatggccatcgccagcctgaacggctatcgcctgggcgagcgcgtgctgcaggtctccttcaagaccagcaaacagcacaaggcgtgagcccaccccgcctgccctcccaccccctccccgggcagcagagagagagagagagaaagagagagagagagagagaaggggcccaagagagacagcacaggcagccccacggacgacgcgagggccccacgtccctgcggaagccacagggtgagcactctggggtgggagggtctgcagggaattgggggggtgcccggggatcccccgccccatcctcctgcccccaccccaggctgggctgttcactctctcgtcttggtttggttcatggtgaaggtttttgtttcttttttcggctaaaaagaatgcagagatgtgcccccacccccaccctcgaccacccccgatgggatggcttggggggctccagggggtgccctcccagacccccttgcccaggcctccccagcacctaggtggggcctggggtaggaggaacaggtttaaaaatccccaaaaaagcgaaccgtgaggaggggtgtgggcacccccggcccagtgccccctggtggaatgcgggggagcaggcagtggggctggaagcagaaacaaaatgaaaaaaaaaggggggtgggaggggaagaaaaactctatttttgtaaaaagggaaaaagacctcgtggagaatttttactggggattcttgaacttgaaaaaaaaaaacacaaaaaaagacaaaaaaaaaaaaagaaaatattttggcaggttatgtttaccaactggggcgggggtggggggggcccagggagcagggcttaggggctagcagcccacggggccacacagagaaacaaccacgcagacagtcacaccacggggacacacggacagacgcagacggacacagcgacatgccccagacacgttaagggactggttggccaaactcagacacgtggacagggatagacagaaagagacagaagctggggctacgtccatgtggacacagaccacagatgtgggcacacgaatccatccacctgtccacgtgcacacgtgaatgtagcgatagatatttggacatcaaatttggacaccaggtcacggagaaacacaaacaccacccaggaacacgcagacatatgcccatagcatcccacaggcccaggcaggaggtcccaccccagaccctgccccagacgctccctcaccctctcggccccctcgccctggcccccaggttctctgcagagatctctcctggacccccagcggtctccttggcgcccacgaacacaggcgtgcacacgcagcgcacatgcattgagacacacgatacctcgttccaccttggcgtcacggtgggctggaggcagcccccccccccacaacacttgaggccaaaggacacccctgtccccggggctcagcctccccctgggccgaggccttggcccacacagctgagggagaggcccagccctgagcctcccccaccaggactgggcctccccggcagcaagaccccggcactccccgccaggcccagggtggggtggatgggcccaaaggcccagccccacactcctttcccgtccacttgtcacctacctatcccctttcggtttgttgggtttttcgtctttccagattgcagtggacacagcccccgatctcgagccccggcccccggcttctgtctggacattgcatcgccctagttttctttctttaaaaaaaaaaaattccaacagaagccacaggccggagcccctgggagccctcgcaccgctccccaccccactcagcggccccatcggaactgagaattgcaaaacccccgactttagctatagttaagttgccttcccccggtgtccccacgtttggtgtctggctatggcgcccccatctgactgtccagctctctctcccccacccctcccggtgttgttattaaacgtctgtggagcttctgctgcaaggaacaaaaaagaaaaaaatcaaaaaagcgacaaaaaaacacaaacagaagaggaaaaaaaagcaacaaaaaaagaaaacacacagaagagatttaaaaaaaaaaaaggaaaaaaaaaaaagacataaactggcaccagttaactttcttgtacttttttgctgaatttagcttcttgtagttttaacttattgctatgttaactatttattctcctcgttgccctgtaaggacatccgtgtatatttctgttacttcatccggtttgcaagttaaaggaacgacaatgttctctttgtttctttaagttttgccgagacatggttatgcctaatttatttataaaaggggaagtggaatcattaaagtaataataattattaataacagtaatggtagccgagtggcacgcgggggcgtgtgctctgcgggacagtccccacggccagcgacgtccaggtcaccaatgggattctttttgctcttgtcttgagaattttttcagtcctatttagctggtgaaatccctagcttgttcttgatacacgaacctatttattctcgtggttttaagtcctccctgccctctctcctctcccctgcagcagggcagggacccctctcccctgctgtctcttggggctctctcccctccgccctctgcattcgggaacacgcacgtccgcgtgggaagcttgcagcagggcgtccgagcaataagggctgggtttgtcccccaccctggggggggccaggctccagagagggggcacctccccacacaccccccccccaccgaggcctaggcccctgccacccccaagactgggaggggacttctttttctaaaacacaaaactcagcccagccaggccccctccctggaggccagcccctccccgcagggggccaggccggggctcccaggcgagggggacttggggcttccacgtccctggggggcaggggccaggccaggggggagggggctcagcccctccacccctcccttcatcctgttatttattcggaaggtttcaaatcacgacagagtccatgttggaggtgataaaaaactgtaaaaaaaaaaaaaaaaaaaaagacaaaacaaaagacaaaaaaaaaaaaaaaacccaacaagaacacttcgcgttgcgtttagactatttattaccgggatcacaggcctggccgcggtaacagacttttacatggaattgtttaattatttgtacttttcatgccagaaaataaaagttcagaatctt

SEQ ID NO: 205 - DNA, 1542 bp, Artificial Sequence
  HLA-DQA1
acaattactctacagctcagaacaccaactgctgaggctgccttgggaagaggatgatcctaaacaaagctctgctgctgggggccctcgctctgaccaccgtgatgagcccctgtggaggtgaagacattgtggctgaccacgttgcctcttgtggtgtaaacttgtaccagttttacggtccctctggccagtacacccatgaatttgatggagatgagcagttctacgtggacctggagaggaaggagactgcctggcggtggcctgagttcagcaaatttggaggttttgacccgcagggtgcactgagaaacatggctgtggcaaaacacaacttgaacatcatgattaaacgctacaactctaccgctgctaccaatgaggttcctgaggtcacagtgttttccaagtctcccgtgacactgggtcagcccaacaccctcatttgtcttgtggacaacatctttcctcctgtggtcaacatcacatggctgagcaatgggcagtcagtcacagaaggtgtttctgagaccagcttcctctccaagagtgatcattccttcttcaagatcagttacctcaccttcctcccttctgctgatgagatttatgactgcaaggtggagcactggggcctggaccagcctcttctgaaacactgggagcctgagattccagcccctatgtcagagctcacagagactgtggtctgtgccctggggttgtctgtgggcctcatgggcattgtggtgggcactgtcttcatcatccaaggcctgcgttcagttggtgcttccagacaccaagggccattgtgaatcccatcctggaagggaaggtgcatcgccatctacaggagcagaagaatggacttgctaaatgacctagcactattctctggcccgatttatcatatcccttttctcctccaaatatttctcctctcaccttttctctgggacttaagctgctatatcccctcagagctcacaaatgcctttacattctttccctgacctcctgattttttttttcttttctcaaatgttacctacaaagacatgcctggggtaagccacccggctacctaattcctcagtaacctccatctaaaatctccaaggaagcaataaattccttttatgagatctatgtcaaatttttccatctttcatccagggctgactgaaactatggctaataattggggtactcttatgtttcaatccaatttaacctcatttcccagatcatttttcatgtccagtaacacagaagccaccaagtacagtatagcctgataatatgttgatttcttagctgacattaatatttcttgcttccttgtgttcccacccttggcactgccacccacccctcaattcaggcaacaatgaaattaatggataccgtctgcccttggcccagaattgttatagcaaaaattttagaaccaaaaaataagtctgtactaatttcaatgtggcttttaaaagtatgacagagaaataagttaggataaaggaaatttgaatctca

SEQ ID NO: 206 - DNA, 3962 bp, Artificial Sequence
  ITGA9
cgcgctcggcgccctgctcgccgggcagaggggaaggcggcggccggctggggatgggcggcccggctgcgccgaggggcgccgggaggctccgcgcgctgctgctggcgctggtggtcgcggggatccccgcgggcgcctacaacctcgacccgcagcgccccgtgcacttccagggccccgctgactcgttcttcggctacgcagttctggagcatttccacgacaacacgcgctgggtccttgtgggcgcaccaaaggcagattccaaatacagcccttcagtgaagtctcctggggctgtgtttaagtgccgtgttcacaccaaccctgaccggagatgcaccgaactggacatggctcgagggaagaatcggggcacgtcctgcggaaagacctgccgggaagaccgcgatgatgagtggatgggggtgagcctggcccgacagcccaaggctgatggccgtgtgttggcctgtgctcatcgctggaagaacatctactatgaagccgaccacatcctaccccatggcttctgctacatcatcccctccaacctccaggccaaaggcaggacgctgatcccttgctatgaagagtataagaagaagtacggagaggaacacggctcctgccaggctgggatagcgggcttcttcaccgaggagctggtggtgatgggtgctccagggtcattttattgggctggaaccatcaaagtgctgaaccttacggacaacacctatttaaaactgaacgacgaagtgatcatgaacaggcggtacacctacctgggctacgcagtgaccgctggccacttctctcacccgtccaccattgatgtggtaggaggtgccccacaggacaaaggcatcggcaaggtttatattttcagagctgaccgaagatcaggcaccttaattaagatctttcaagcatcaggtaaaaagatgggctcttacttcggctcctccttgtgcgcagttgacctgaatggggacggcctctctgacctgctggtgggggcccccatgttttctgagatcagggatgagggacaggtcactgtctacatcaacagaggaaatggagccctcgaggagcagctggctctgactggggatggtgcctacaatgcgcactttggagagagcattgccagcctggacgatctggacaatgatgggttcccagatgtggccattggtgcacccaaggaggatgacttcgcaggggcggtctatatctatcatggtgatgccggtgggatagtccctcagtactcaatgaaactgtctgggcagaagataaatccagtgctccggatgtttggtcagtccatatcgggaggcattgatatggatggaaatggctatcctgatgtcactgttggagccttcatgtccgacagcgtggttcttctcagagcaaggcctgtcattacggtggatgtctccatcttcctcccgggctccatcaacatcacagcgcctcagtgtcacgacggacagcagcctgtgaactgcctgaacgtcaccacctgcttcagcttccatggcaaacacgttccaggagagattggcctgaattatgttctgatggctgacgtggccaaaaaggagaagggccagatgcccagggtctactttgtgctgctgggagagaccatgggtcaggtcacagagaagctgcagctgacttacatggaggagacgtgtcgtcactatgtggcccatgtgaagcggagggtgcaggacgtcatcagcccgatcgtgtttgaagcagcctacagcctcagtgagcatgtgactggagaggaggagagggaactgccgcctctgacaccagttctccgctggaaaaagggacaaaagattgcccaaaagaatcagactgtttttgaaaggaattgccgttcagaggactgtgccgcagacctgcagcttcagggtaaactgctgctctccagtatggatgagaaaaccctgtatctagctttgggggctgtgaagaacatctccctaaacatctctatctccaacctcggagatgatgcctatgatgccaacgtgtccttcaatgtttcccgggagctcttcttcatcaacatgtggcagaaggaggagatgggcatctcctgtgagctgctggaatcggacttcctcaaatgcagcgtgggatttcctttcatgaggtcaaagtcaaagtatgaattcagcgtgatctttgatacaagccacctgtctggggaagaggaagttctcagcttcattgttactgctcagagtggcaacacggagcgctctgaatccctgcatgacaacaccctcgtgctgatggtgccactgatgcacgaggtggacacgtccatcaccggaatcatgtctccaacctcctttgtatatggcgagtccgtggacgcagccaacttcattcagctggatgacctggagtgtcactttcagcccatcaatatcacccttcaggtctacaacactggcccaagcacccttccagggtcatctgtcagcatctctttccctaatcgactctcatctggtggtgcagagatgtttcatgtccaggaaatggtggtgggccaagagaagggaaactgctctttccagaaaaacccaactccctgcatcatccctcaagaacaagaaaatatcttccacacaatatttgcttttttcacaaagtctggaagaaaagtcttggactgtgaaaaaccaggaatttcttgcctaacagcacactgtaactttagtgctcttgctaaagaagaaagtcgtactatagacatttacatgctgctgaacacagaaatactgaaaaaggacagttcgtctgtcatccagttcatgtcccgcgccaaggtgaaggtggatcctgccctaagggtggtggaaatagctcatgggaacccagaagaggtgacggtggtcttcgaggccctgcacaatctggagccccgtggctacgtcgtggggtggatcatcgccatcagtttgttggtgggaatcctcatcttcctgctgctggccgtgctgctctggaagatgggcttctttcgccgaaggtacaaagaaattatcgaagctgagaagaaccggaaagagaatgaagacagttgggactgggtccagaaaaaccagtgagctgccacaccagtcacatgacctgatcactagcctgtcatccttggtctttgtatcttccatatttggaagaaaaaaatcttctccagatttttcggaggccccactgatgctgttctcttcttcattctatcaagcccaggtgccagcctgaggcagccacttcggccaggtcacacgaccggggccagcaccacttcctttaaagatgaactctgaactttggagagtgagctacagagccgagcaatatttatggatgcaacacgcatggtcaaccctcaggggaaaactgttacctaaagtatttttataaatataagccttttatactgattatgtcttttatatttgtatcgatgttttattatttctattaaatagttatataattcactcaagcactgatatctggcctaaaatcttggaagtacatgtccatgaatacaaattttaaaggatgaaaatcttaccgtactttggaacttgctgtttaaaaagacagatgaaataagttgaagaaacctcatgtaatgaatccaccaggctggcagtggtgcatataaactgtgggtgtggcaagaccccgaagacatttcacatctttatcgcctcgatcaagtgtggagtcacatgctaatgtgtgctaaagaactgtaagtgttttttcatatgtacttttcattggaagattcccaacaagaatttggatggaaaacctgatccctagcaagaagtctgctctgtatcacctttatatagcagacatgtcaccctgcttctacacagatgatggatgaa

SEQ ID NO: 207 - DNA, 2268 bp, Artificial Sequence
  DES
gtctcccctcgccgcatccactctccggccggccgcctgcccgccgcctcctccgtgcgcccgccagcctcgcccgcgccgtcaccatgagccaggcctactcgtccagccagcgcgtgtcctcctaccgccgcaccttcggcggggccccgggcttcccactcggctccccgctgagttcgcccgtgttcccgcgggcgggtttcggctctaagggctcctccagctcggtgacgtcccgcgtgtaccaggtgtcgcgcacgtcgggcggggccgggggcctggggtcgctgcgggccagccggctggggaccacccgcacgccctcctcctacggcgcaggcgagctgctggacttctcactggccgacgcggtgaaccaggagtttctgaccacgcgcaccaacgagaaggtggagctgcaggagctcaatgaccgcttcgccaactacatcgagaaggtgcgcttcctggagcagcagaacgcggcgctcgccgccgaagtgaaccggctcaagggccgcgagccgacgcgagtggccgagctctacgaggaggagctgcgggagctgcggcgccaggtggaggtgctcactaaccagcgcgcgcgcgtcgacgtcgagcgcgacaacctgctcgacgacctgcagcggctcaaggccaagctgcaggaggagattcagttgaaggaagaagcagagaacaatttggctgccttccgagcggacgtggatgcagctactctagctcgcattgacctggagcgcagaattgaatctctcaacgaggagatcgcgttccttaagaaagtgcatgaagaggagatccgtgagttgcaggctcagcttcaggaacagcaggtccaggtggagatggacatgtctaagccagacctcactgccgccctcagggacatccgggctcagtatgagaccatcgcggctaagaacatttctgaagctgaggagtggtacaagtcgaaggtgtcagacctgacccaggcagccaacaagaacaacgacgccctgcgccaggccaagcaggagatgatggaataccgacaccagatccagtcctacacctgcgagattgacgccctgaagggcactaacgattccctgatgaggcagatgcgggaattggaggaccgatttgccagtgaggccagtggctaccaggacaacattgcgcgcctggaggaggaaatccggcacctcaaggatgagatggcccgccatctgcgcgagtaccaggacctgctcaacgtgaagatggccctggatgtggagattgccacctaccggaagctgctggagggagaggagagccggatcaatctccccatccagacctactctgccctcaacttccgagaaaccagccctgagcaaaggggttctgaggtccataccaagaagacggtgatgatcaagaccatcgagacacgggatggggaggtcgtcagtgaggccacacagcagcagcatgaagtgctctaaagacagagaccctctgccaccagagaccgtcctcacccctgtcctcactgctccctgaagccagccttcttccatcccaggacaccacacccagcctcagtcctcccctcacagcctctgacccctcctcactggccatccctcgtggtccccaacagcgacatagcccatccctgcctggtcacagggcatgccccggccacctctgcggaccccagctgtgagccttggctgttggcagtgagtgagcctggctcttgtgctggatggagcccaggcgggagcggtggccctgtccctcccacctctgtgacctcaggcactagcctttggctctggagacagccccagagcagggtgttgggatactgcagggccaggactgagccccgcagacctccccagcccctagcccaggagagagaaagccaggcaggtagccagggggactagcccctgtggagactggggggcttgaaattgtccccgtggtctcttactttcctttccccagcccagggtggacttagaaagcaggggctacaagagggaatccccgaaggtgctggaggtgggagcaggagattgagaaggagagaaagtgggtgagatgctggagaagagaggagaggagagaggcagagagcggtctcaggctggtgggaggggcgcccacctccccacgccctcccctcccctgctgcaggggctctggagagaaacaataaagagattcacacacaagccaaaaaaaaaaaaaaaaaaaaaa

SEQ ID NO: 208 - DNA, 1403 bp, Artificial Sequence
  RGS1
gcctgtctgcattctactatataaagcagcagagacgttgactagcgcatatttgctaagagcaccatgcgcgcagcagccatctccactccaaagttagacaaaatgccaggaatgttcttctctgctaacccaaaggaattgaaaggaaccactcattcacttctagacgacaaaatgcaaaaaaggaggccaaagacttttggaatggatatgaaagcatacctgagatctatgatcccacatctggaatctggaatgaaatcttccaagtccaaggatgtactttctgctgctgaagtaatgcaatggtctcaatctctggaaaaacttcttgccaaccaaactggtcaaaatgtctttggaagtttcctaaagtctgaattcagtgaggagaatattgagttctggctggcttgtgaagactataagaaaacagagtctgatcttttgccctgtaaagcagaagagatatataaagcatttgtgcattcagatgctgctaaacaaatcaatattgacttccgcactcgagaatctacagccaagaagattaaagcaccaacccccacgtgttttgatgaagcacaaaaagtcatatatactcttatggaaaaggactcttatcccaggttcctcaaatcagatatttacttaaatcttctaaatgacctgcaggctaatagcctaaagtgactggtccctggctgaagggaattaacagatagtatcaagcgcagaaggaatgtgccagtatggctccctgggtgaacagcttggccttttttgggtgtcttgacaggccaagaagaacaaatgactcagaatggattaacatgaaagttatccaggcgcagagttgaagaagcataagcaagacaaaaacagagagaccgcagaaggaggaagatactgtggtactgtcataaaaaacagtggagctctgtattagaaagcccctcagaactgggaaggccaggtaactctagttacacagaaactgtgactaaagtctatgaaactgattacaacagactgtaagaatcaaagtcaactgacatctatgctacatattattatatagtttgtactgagctattgaagtcccattaacttaaagtatatgttttcaaattgccattgctactattgcttgtcggtgttattttattttattgtttttgactttggaagagatgaactgtgtatttaacttaagctattgctcttaaaaccagggagtcagaatatatttgtaagttaaatcattggtgctaataataaatgtggattttgtattaaaatatatagaagcaatttctgtttacatgtccttgctacttttaaaaacttgcatttattcctcagattttaaaaataaataaataattcatttaagattc

SEQ ID NO: 209 - DNA, 12747 bp, Artificial Sequence
  FLG
cttttggtgaacaaggttcacatttattgccaaaagatgtctactctcctggaaaacatctttgccataattaatcttttcaagcaatattcaaaaaaagataaaaacactgacacattgagtaaaaaagagctgaaggaacttctggaaaaggaatttcggcaaatcctgaagaatccagatgacccagatatggttgatgtcttcatggatcacttggatatagaccacaacaagaaaattgacttcactgagtttcttctgatggtattcaagttggctcaagcatattatgagtctaccagaaaagagaatttaccgatatcaggacacaagcacagaaagcacagtcatcatgataaacatgaagataataaacaggaagaaaacaaagaaaacagaaaaagaccctcaagtctggaaagaagaaacaatagaaaagggaataagggaagatccaagagcccaagagaaacaggggggaaaaggcatgaatctagttctgaaaaaaaagaaagaaaaggatattcacctactcatagagaagaagaatatggaaaaaaccatcataactcaagtaaaaaagagaaaaacaagactgaaaatactagattaggagacaataggaagaggctaagtgaaagacttgaagagaaagaagacaatgaagaaggagtatatgattatgaaaatacaggaagaatgactcaaaaatggatacaatcaggccatattgccacatattacacaatccaggatgaagcctatgacaccactgatagtctattagaagaaaacaaaatatatgaaagatcaaggtcatctgatggcaaatcatcatctcaagtgaacaggtcaagacatgaaaatacaagccaggtaccattgcaggagtccaggacaagaaagcgtaggggatccagagttagccaggacagggacagtgagggacactcagaagactctgagaggcactctgggtcggcttccagaaaccatcatggatctgcgtgggagcagtcaagagatggctccagacaccccaggtcccatgatgaagacagagccagtcatgggcactctgcagacagctccagacaatcaggcactcgtcacgcagagacttcctctcgtggacagactgcatcatcccatgaacaggcaagatcaagtccaggagaaagacatggatccggccaccagcagtcagcagacagctccagacactcagccactgggcgcgggcaagcttcatctgcagtcagcgatcgtggacaccgggggtctagcggtagtcaggccagtgacagtgagggacattcagaaaactcagacacacaatcagtgtcaggccacggaaaggctgggctgagacagcagagccaccaagagtccacacgtggccggtcaggggaacggtctggacgttcagggtcttccctctaccaggtgagcactcatgaacagcctgactctgcccatggacggaccgggaccagcactggaggaagacaaggatcgcaccacgagcaggcacgagacagctccaggcattcagcgtcccaagagggtcaggacaccattcgtggacacccggggtcaagcagaggaggaaggcagggatcccaccacgagcaatcggtaaataggtctggacactcaggttcccatcacagccacaccacatcccagggaaggtctgatgcctcccatgggcagtcaggatccagaagtgcaagcagacaaacacgaaatgaggaacaatcaggagacggcaccaggcactcagggtcacgtcatcatgaagcttcctctcaggctgacagctctagacactcacaggtgggccagggacaatcatcggggcccaggacaagtaggaaccagggatccagtgttagccaggacagtgacagtcagggacactcagaagactctgagaggtggtctgggtctgcttccagaaaccatcatggatctgctcaggagcagtcaagagatggctccagacaccccaggtcccatcacgaagacagagctggtcatgggcactctgcagacagctccagaaaatcaggcactcgtcacacacagaattcctctagtggacaggctgcgtcatcccatgaacaggcaagatcaagtgcaggagaaagacatggatcccgccaccagctccagtcagcagacagctccagacactcaggcactgggcacggacaagcttcatctgcagtcagagacagtggacaccgagggtccagtggtagtcaggccactgacagtgagggacattcagaagactcagacacacagtcagtgtcaggccatggacaggctggtcaccatcagcagagccaccaagagtccgcacgtgaccggtcaggggaaaggtctcgacgttcagggtctttcctctaccaggtgagcactcataaacagtctgagtcctcccatggatggacagggcccagcactggagtaagacaaggatcccaccatgagcaggcacgagacaactccaggcactcagcatcccaagatggtcaggacaccattcgtggacacccggggtcaagcagaagaggaaggcaggggtcccaccacgagcaatcggtagataggtctggacactcagggtcccatcacagccacaccacatcccagggaaggtctgatgcctcccgtgggcagtcaggatccagaagtgcaagcagaacaacacgtaatgaggaacaatcaagagacggctccaggcactcagggtcacgtcaccatgaagcttcctctcatgccgacatctctagacactcacaggcaggccagggacaatcagaggggtccaggacaagcaggcgccagggatccagtgttagccaggacagtgacagtgagggacattcagaagactctgagaggtggtctgggtctgcttccagaaaccatcgtggatctgctcaggagcagtcaagacatggctccagacaccccaggtcccatcacgaagacagagccggtcacgggcactctgcagacagctccagacaatcaggaactcctcacgcagagacttcctctggtggacaggctgcgtcatcccatgaacaggcaagatcaagtccaggagaaagacacggatcccgccaccagcagtcagcagacagctccagacactcaggcattccgcgcagacaagcttcatctgcagtcagagacagtggacactgggggtccagtggtagtcaggccagtgatagtgagggacattcagaggagtcagacacacagtcagtgtcaggccatggacaggatgggccccatcagcagagccaccaagagtccgcacgtgactggtcagggggaaggtctggacgttcagggtctttcatctaccaggtgagcactcatgaacagtctgagtctgcccatgggcggaccaggaccagcactggacgaagacaaggatcccaccacgagcaggcacgagacagctccaggcactcagcgtcccaagagggtcaggacaccattcgtgcacacccggggtcaaggagaggaggaaggcagggatcccaccatgagcaatcggtagatagatctggacactcagggtcccatcacagccacaccacatcccagggaaggtctgatgcctcccatgggcagtcaggatccagaagtgcaagcagacaaactcgtaaggacaaacaatcaggagacggctccaggcactcagggtcacgtcaccatgaagctgcctcttgggctgacagctctagacactcacaggtgggacaggaacaatcatcggggtccaggacaagcaggcaccagggatccagtgttagccaggacagtgacagtgagagacactcagacgactccgagaggttgtctgggtctgcttccagaaaccatcatggatcttctcgggagcagtcaagagatggctccagacaccctgggttccatcaagaagacagagccagtcacgggcactctgcagacagctccagacaatcaggcactcatcacacagagtcttcctctcatggacaggctgtgtcatcccatgaacaggcaagatcaagtccaggagaaagacatggatcccgccaccagcagtcagcagacagctccagacactcaggcattgggcacagacaagcttcatctgcagtcagagacagtggacaccgagggtccagtggtagtcaggtcactaacagtgagggacattcagaagactcagacacacagtcagtgtcagcccacggacaagctgggccccatcagcagagccacaaagagtccgcacgtggccagtcaggggaaagctctggacgttcaaggtctttcctctaccaggtgagctctcatgaacagtctgagtccacacacggacagactgcacccagcactggaggaagacaaggatcccgccatgagcaggcacgaaacagctctaggcactcagcatcccaagacggtcaggacaccattcgtggacacccggggtcaagcagaggaggaaggcagggatcctaccacgagcaatcagtagataggtctggacactcagggtaccatcacagccacaccacaccccagggaaggtctgatgcctcccatgggcagtcaggacccagaagtgcaagcaggcaaacaagaaatgaggaacaatcaggagacggctccaggcactcagggtcacgtcaccatgaaccttccactcgggccggcagctctagacactcacaggtgggccagggagaatcagcggggtccaagacaagcaggcgccagggatccagtgttagtcaggacagggacagtgagggacactcagaagactctgagaggcggtctgagtcggcttccagaaaccattatggatctgctcgggagcagtcaagacatggctccaggaaccccaggtcccatcaagaagatagagccagtcatgggcactctgcagagagctccagacaatcaggcactcgtcatgcagagacttcctctggtggacaggctgcatcatcccaggaacaggcaaggtcaagtccaggagaaagacatggatcccgccaccagcagtcagcagacagctccacagactcaggcactgggcgcagacaagattcatctgtagtcggagacagtggaaaccgagggtccagtggtagccaggccagtgacagcgagggacactcagaagagtcagacacacagtcagtgtcagcccacggacaggctgggccccatcagcagagccaccaagagtccacacgtggccagtcaggggaaaggtctggacgttcagggtctttcctctaccaggtgagcactcatgaacagtctgagtccgcccatggacgcacagggcccagcactggaggaagacaaagatcccgccacgagcaggcacgagacagctccaggcactcagcgtcccaagagggtcaggacaccattcgtggacacccagggtcaagcagaggaggaaggcagggatcccactatgagcaatcggtagatagttctggacactcagggtctcatcacagccacaccacgtcccaggaaaggtctgatgtctcccgtgggcagtcaggatccagaagtgtcagcagacaaacacgtaatgagaaacaatcaggagacggctccaggcactcagggtcgcgtcaccatgaagcttcctctcgggccgacagctctagacactcgcaggtgggccagggacaatcatcagggcccaggacaagcaggaaccagggatccagtgttagccaggacagtgacagtcagggacactcagaagactctgagaggtggtctgggtctgcttccagaaaccatcttggatctgcttgggagcagtcaagagatggctccagacaccctgggtcccatcacgaagacagagccggtcacgggcactctgcagacagctccagacaatcaggcactcgtcacacagagtcttcctctcgtggacaggctgcgtcatcccatgaacaggcaagatcaagtgcaggagaaagacatggatcccaccaccagctccagtcagcagacagctccagacactcaggcattgggcatggacaagcttcatctgcagtcagagacagtggacaccgagggtacagtggtagtcaggccagtgacagtgagggacattcagaagactcagacacacagtcagtgtcagcacagggaaaagctgggccccatcagcagagccacaaagagtccgcacgtggccagtcaggggaaagctctggacgttcagggtctttcctctaccaggtgagcactcatgaacagtctgagtccacccatggacagtctgcgcccagcactggaggaagacaaggatcccattatgatcaggcacaagacagctccaggcactcagcatcccaagagggtcaggacaccattcgtggacacccggggccaagcagaggaggaagacaggggtcccaccaagagcaatcggtagataggtctggacactcagggtctcatcacagccacaccacatcccagggaaggtctgatgcctcccgtgggcagtcaggatccagaagtgcaagcagaaaaacatatgacaaggaacaatcaggagatggctctaggcactcagggtcgcatcatcatgaagcttcctcttgggccgacagctctagacactcactggtgggccagggacaatcatcagggcccaggacaagcaggccccggggatccagtgttagccaggacagtgacagtgagggacactcagaagattctgagaggcggtctgggtctgcgtccagaaaccatcatggatctgctcaggagcagtcaagagatggctccagacaccccaggtcccatcacgaagacagagccggtcatgggcactctgcagagagctccagacaatcaggcactcatcatgcagagaattcctctggtggacaggctgcatcatcccatgaacaggcaagatcaagtgcaggagagagacacggatcccaccaccagcagtcagcagacagctccagacactcaggcattgggcacggacaagcttcatctgcagtcagagacagtggacaccgagggtccagtggtagtcaggccagtgacagtgagggacattcagaagactcagacacacagtcagtgtcagcccacggacaggctgggccccatcagcagagccaccaagagtccacacgtggccggtcagcaggaaggtctggacgttcagggtctttcctctaccaggtgagcactcatgaacagtctgagtccgcccatggacggaccgggaccagcactggaggaagacaaggatcccaccacaagcaggcacgagacagctccaggcactcaacgtcccaagagggtcaggacaccattcatggacacccggggtcaagcagtggaggaaggcagggatcccactacgagcaattggtagatagatctggacactcagggtctcatcacagccacaccacatcccagggaaggtctgatgcctcccatgggcactcaggatccagaagtgcaagcagacaaactcgtaacgatgaacaatcaggagacggctccaggcactcagggtcgcgtcaccatgaagcttcctctcgggccgacagctctggacactcgcaggtgggccagggacaatcagaggggcccaggacaagcaggaactggggatccagttttagccaggacagtgacagtcagggacactcagaagactctgagaggtggtctgggtctgcttccagaaaccatcatggatctgctcaggagcagctaagagatggctccagacaccccaggtcccatcaagaagacagagctggtcatgggcactctgcagacagctccagacaatcaggcactcgtcacacacagacttcctctggtggacaggctgcatcatcccatgaacaggcaagatcaagtgcaggagaaagacatggatcccaccaccagcagtcagcagacagctccagacactcaggcattgggcacggacaagcttcatctgcagtcagagacagtggacaccgagggtacagtggtagtcaggccagtgacaatgagggacattcagaagactcagacacacagtcagtgtcagcccacggacaggctgggtcccatcagcagagccaccaagagtccgcacgtggccggtcaggggaaacgtctggacattcaggatctttcctctaccaggtgagcactcatgaacagtctgagtcctcccatggatggacggggcccagcactagaggaagacaaggatcccgccatgagcaggcacaagacagctccaggcactcagcatcccaagacggtcaggacaccattcgtggacacccggggtcaagcagaggaggaaggcaggggtaccaccacgagcattcggtagatagctctggacactcagggtcccatcacagccacaccacatcccagggaaggtctgatgcctcccgtgggcagtcaggatccagaagtgcaagcagaacaacacgtaatgaggaacaatcaggagacggctccaggcactcagggtcgcgtcaccatgaagcttccactcatgccgacatctctagacactcacaggcagtccagggacaatcagaggggtccaggagaagcaggcgccagggatccagtgtgagccaggacagtgacagtgagggacattcagaagactctgagaggtggtctgggtctgcttccagaaaccatcatggatctgctcaggagcagctaagagatggctccagacaccccaggtcccatcaagaagacagagctggtcatgggcactctgcagacagctccagacaatcaggcactcgtcacacacagacttcctctggtggacaggctgcatcatcccatgaacaggcaagatcaagtgcaggagaaagacatggatcccaccaccagcagtcagcagacagctccagacactcaggcattgggcacggacaagcttcatctgcagtcagagacagtggacaccgagggtacagtggtagtcaggccagtgacaatgagggacattcagaagactcagacacacagtcagtgtcagcccacggacaggctgggtcccatcagcagagccaccaagagtccgcacgtggccggtcaggggaaacgtctggacattcaggatctttcctctaccaggtgagcactcatgaacagtctgagtcctcccatggatggacggggcccagcactagaggaagacaaggatcccgccatgagcaggcacaagacagctccaggcactcagcatcccaatacggtcaggacaccattcgtggacacccggggtcaagcagaggaggaaggcaggggtaccaccacgagcattcggtagatagctctggacactcagggtcccatcacagccacaccacatcccagggaaggtctgatgcctcccgtgggcagtcaggatccagaagtgcaagcagaacaacacgtaatgaggaacaatcaggagacagctccaggcactcagtgtcacgtcaccatgaagcttccactcatgccgacatctctagacactcacaggcagtccagggacaatcagaggggtccaggagaagcaggcgccagggatccagtgtgagccaggacagtgacagtgagggacattcagaagactctgagaggtggtctgggtctgcttccagaaaccatcgtggatctgttcaggagcagtcaaggcacggctccagacaccccaggtcccatcacgaagacagagccggtcacgggcactctgcagaccgctccagacaatcaggcactcgtcacgcagagacttcctctggtggacaggctgcatcatcccatgaacaggcaagatcaagtccaggagagagacacggatcccgccaccagcagtcagcagacagctccagacactcaggcattccgcgtggacaagcttcatctgcagtcagagacagtagacactgggggtccagtggtagtcaggccagtgatagtgagggacattcagaagagtcagacacacagtcagtgtcaggccatggacaggctgggccccatcagcagagccaccaagagtccgcacgtgaccggtcagggggaaggtctggacgttcagggtctttcctctaccaggtgagcactcatgaacagtctgagtctgcccatgggcggaccaggaccagcactggacgaagacaaggatcccaccacgagcaggcacgagacagctccaggcactcagcgtcccaagagggtcaggacaccattcgtggacacccggggtcaagcagaagaggaaggcagggatcccactacgagcaatcggtagataggtctggacactcagggtcccatcacagccacaccacatcccagggaaggtctgatgcctcccgtgggcagtcaggatccagaagtgccagcagacaaactcgtaatgacgaacaatcaggagatggctccaggcactcatggtcgcatcaccatgaagcttccactcaggcggacagctctagacactcacagtccggccagggacaatcagcggggcccaggacaagcaggaaccagggatccagtgttagccaggacagtgacagtcagggacactcagaagactctgagaggtggtctgggtctgcttccagaaaccatcgtggatctgctcaggagcagtcaagagatggctccagacaccccacgtcccatcacgaagacagagccggtcacgggcactctgcagagagctccagacaatcaggcactcatcatgcagagaattcctctggtggacaggctgcatcatcccatgaacaggcaagatcaagtgcaggagagagacatggatcccaccaccagcagtcagcagacagctccagacactcaggcattgggcacggacaagcttcatctgcagtcagagacagtggacaccgagggtccagtggtagtcaggccagtgacagtgagggacattcagaagactcagacacacagtcagtgtcagcccacggacaggctgggccccatcagcagagccaccaagagtccacacgtggccggtcagcaggaaggtctggacgttcagggtctttcctctaccaggtgagcactcatgaacagtctgagtctgcccatggacgggctgggcccagtactggaggaagacaaggatcccgccacgagcaggcacgagacagctccaggcactcagcgtcccaagagggtcaggacaccattcgtggacacccggggtcaaggagaggaggaagacagggatcctaccacgagcaatcggtagataggtctggacactcagggtcccatcacagccacaccacatcccagggaaggtctgatgcctcccatgggcagtcaggatccagaagtgcaagcagagaaacacgtaatgaggaacagtcaggagacggctccaggcactcagggtcgcgtcaccatgaagcttccactcaggctgacagctctagacactcacagtccggccagggtgaatcagcggggtccaggagaagcaggcgccagggatccagtgttagccaggacagtgacagtgaggcatacccagaggactctgagaggcgatctgagtctgcttccagaaaccatcatggatcttctcgggagcagtcaagagatggctccagacaccccggatcctctcaccgcgatacagccagtcatgtacagtcttcacctgtacagtcagactctagtaccgctaaggaacatggtcactttagtagtctttcacaagattctgcgtatcactcaggaatacagtcacgtggcagtcctcacagttctagttcttatcattatcaatctgagggcactgaaaggcaaaaaggtcaatcaggtttagtttggagacatggcagctatggtagtgcagattatgattatggtgaatccgggtttagacactctcagcacggaagtgttagttacaattccaatcctgttgttttcaaggaaagatctgatatctgtaaagcaagtgcgtttggtaaagatcatccaaggtattatgcaacgtatattaataaggacccaggtttatgtggccattctagtgatatatcgaaacaactgggatttagtcagtcacagagatactattactatgagtaagaaattaatggcaaaggaattaatccaagaatagaagaatgaagcaagttcactttcaatcaagaaacttcataatactttcagggaagttatcttttcctgtcaatctgtttaaaatatgctatagtatttcattagtttggtggtagcttatttttattgtgtaatgatctttaaacgctatatttcagaaatattaaatggaagaaatcaatatcatggagagctaactttagaaaactagctggagtattttaggagattctgggtcaagtaatgttttatgtttttgaaagtttaagttttagacactccccaaatttctaaattaatctttttcagaaatatcgaaggagccaaaaatataaaacagttctgtataccaaagtggctatatcaacatcagggctagcacatctttctctattatccttctattggaattctagtattctgtattcaaaaaatcatcttggacataattaatattatagtaagctgcatctaaattaaaaataaactatt

SEQ ID NO: 210 - DNA, 2116 bp, Artificial Sequence
  LUM
acagtgagcttccttatttgaagcaggactcaattcttggttaaaagctatggtatttgagctagttaaacacatatctctctcccattccatagggaatgagctgggctgtcctttctccccacgttcacctgcacttcgttagagagcagtgttcacatgccacaccacaagatccccacaatgacataactccattcagagactggcgtgactgggctgggtctccccaccccccttcagctcttgtatcactcagaatctggcagccagttccgtcctgacagagttcacagcatatattggtggattcttgtccatagtgcatctgctttaagaattaacgaaagcagtgtcaagacagtaaggattcaaaccatttgccaaaaatgagtctaagtgcatttactctcttcctggcattgattggtggtaccagtggccagtactatgattatgattttcccctatcaatttatgggcaatcatcaccaaactgtgcaccagaatgtaactgccctgaaagctacccaagtgccatgtactgtgatgagctgaaattgaaaagtgtaccaatggtgcctcctggaatcaagtatctttaccttaggaataaccagattgaccatattgatgaaaaggcctttgagaatgtaactgatctgcagtggctcattctagatcacaaccttctagaaaactccaagataaaagggagagttttctctaaattgaaacaactgaagaagctgcatataaaccacaacaacctgacagagtctgtgggcccacttcccaaatctctggaggatctgcagcttactcataacaagatcacaaagctgggctcttttgaaggattggtaaacctgaccttcatccatctccagcacaatcggctgaaagaggatgctgtttcagctgcttttaaaggtcttaaatcactcgaataccttgacttgagcttcaatcagatagccagactgccttctggtctccctgtctctcttctaactctctacttagacaacaataagatcagcaacatccctgatgagtatttcaagcgttttaatgcattgcagtatctgcgtttatctcacaacgaactggctgatagtggaatacctggaaattctttcaatgtgtcatccctggttgagctggatctgtcctataacaagcttaaaaacataccaactgtcaatgaaaaccttgaaaactattacctggaggtcaatcaacttgagaagtttgacataaagagcttctgcaagatcctggggccattatcctactccaagatcaagcatttgcgtttggatggcaatcgcatctcagaaaccagtcttccaccggatatgtatgaatgtctacgtgttgctaacgaagtcactcttaattaatatctgtatcctggaacaatattttatggttatgtttttctgtgtgtcagttttcatagtatccatattttattactgtttattacttccatgaattttaaaatctgagggaaatgttttgtaaacatttattttttttaaagaaaagatgaaaggcaggcctatttcatcacaagaacacacacatatacacgaatagacatcaaactcaatgctttatttgtaaatttagtgtttttttatttctactgtcaaatgatgtgcaaaaccttttactggttgcatggaaatcagccaagttttataatccttaaatcttaatgttcctcaaagcttggattaaatacatatggatgttactctcttgcaccaaattatcttgatacattcaaatttgtctggttaaaaaataggtggtagatattgaggccaagaatattgcaaaatacatgaagcttcatgcacttaaagaagtatttttagaataagaatttgcatacttacctagtgaaacttttctagaattatttttcactctaagtcatgtatgtttctctttgattatttgcatgttatgtttaataagctactagcaaaataaaacatagcaaatggcatcactgtgtttgacttcttgtgaaatttctgtactttgtatataaaatacataaaacaatagattagaaatcaaaagatatctctggcctgca

SEQ ID NO: 211 - DNA, 2014 bp, Artificial Sequence
  VSNL1
aggcggcttttggtcacaggctcccgagttctcctagctggggctgcggagctggggggagggaagagaggaaaggggagggggtgcctggagaggcggaggctcgcgcgcctgcgcatccagctccagggaccctaggttttctatgggattcccaatctgcagcagagatttacccgagcgtgttgcggcagcggctgggcttgcaaggcgcgatccaagagggatttaagcagcccagagctccagagaaaaagagagcgagagagaaccacacacagagacggcttaagcgtttacccgaattaaatatatatttttaaaaagaactgttgagttttatcattttcgttaagtgaccgtgcgcagcgctgtaactgcaggatggggaagcagaatagcaaactggcccctgaagtgatggaggacctggtgaagagcacagagtttaatgagcatgaactcaagcagtggtacaaaggatttctcaaggactgtccaagtgggaggctaaatctcgaggaatttcagcagctctatgtgaagttctttccttatggagacgcctccaagtttgcccagcatgccttccgaaccttcgacaagaatggggacggcaccattgacttccgagagttcatctgcgctctgtccatcacctccaggggcagctttgagcagaagctgaactgggccttcaatatgtatgacctggatggtgatggcaagatcacccgagtggagatgctggagatcatcgaggctatctacaaaatggtaggcactgtgatcatgatgaaaatgaatgaggatggcctgacgcctgagcagcgagtagacaagattttcagcaagatggataagaacaaagatgaccagattacactggatgaattcaaagaagctgcaaagagcgacccttccattgtattacttctgcagtgcgacatccagaaatgagctgatgtcaatgctatggactgcacaaaagtctcaatgttccattcagtctgcagctattcacacacacacacacacacacacacacacacacacacacacacacaaatattgcttggactacctataaatggacttgcttcttgtgtttgaaacactcgtgtgcatgagaatgtcatttgctaatgaattttaaaagcatatataaaacaaaacaaacaacctgccacaatgtgatatgtgtaatatcatttcataaaaatccctcttcctccaaagcctgggcagaaatgtgctgcaaagagttatatgacttcttgttcatgttttgctaatgctcgtatctccttgattacataatgttagtagcactgagacccccatggtaatgtaacttaattataagctatgtcactaccctcctgtaaaatactattggacagacacagagggacccttggctcctgtgtctggtccacacaccacagaagcttgtattatcagtgaatataaatgtactacatttgcatgccttttgggtttgccttaattcttacctcatttgcatcctatcgatctggaaagagctgttttggatgaatgcagtataaaatgtaaaaaccctgctaaatgacttattgattaagtatatctatctatatatacatatacacaaagatattatttatcgaaagtaaaaaagatggaagtgtattggtttctgtttgaattttcaaaggcttccaatgtggtggcaataaatgtcccaaataaatttataacaattgattttccccctaattcttattttataattttaaaattgcagcagttgctagcaacaacttactaaatctactcttaaatatacaactttggaatttgaagaattaatgacaacaaaagggaaaaaagcaactttccaacttttcatccaggctcccaaaagagggacaacgaacatggcatgtgaaaagtaaaacagatttgttcattccgaaaaaaaaatgttcattctatgacaataaattttatctcagtgtgaaaaaaaaaa

SEQ ID NO: 212 - DNA, 523 bp, Artificial Sequence
  CD52
ctcctggttcaaaagcagctaaaccaaaagaagcctccagacagccctgagatcacctaaaaagctgctaccaagacagccacgaagatcctaccaaaatgaagcgcttcctcttcctcctactcaccatcagcctcctggttatggtacagatacaaactggactctcaggacaaaacgacaccagccaaaccagcagcccctcagcatccagcaacataagcggaggcattttccttttcttcgtggccaatgccataatccacctcttctgcttcagttgaggtgacacgtctcagccttagccctgtgccccctgaaacagctgccaccatcactcgcaagagaatcccctccatctttgggaggggttgatgccagacatcaccaggttgtagaagttgacaggcagtgccatgggggcaacagccaaaataggggggtaatgatgtaggggccaagcagtgcccagctgggggtcaataaagttacccttgtacttgcaaaaaaaaaaaaaaaaaaa

SEQ ID NO: 213 - DNA, 5231 bp, Artificial Sequence
  ZIC1
ctatcagtctcgcgctcaccgcccggctgaggaggtgaaagtttctccccaggaagataaaccgcaaaagacaatattgtgcatgatttgcgccttttctttggctttttctttctttcttcacccccccacccacttttttttttttttttttcaaaaagcagagagggaaaaacggagagtgaaggagcgaggaggcgagcgtgagagaaaggagagagagagaaaagaaagggcgaggggctagtggagaagtaaggaggggcgcgctgcgcgaggcggagagagggcgaagcagtcgcggcactggcgctcacattcctctatgctacaaatccaggaggaagtttttttttagggggctgagatgctccatgcctttccccgggcagccttgacgcgcggccctctcggcagagactgagcggcgagaaagtgcgagccgggccggcagaatctgcctggcgggcgctggagcctgcgttactcgcggcccgcagccgtccggctactttgcgtttggcccggccagcgcccgggcgcgccgcgccattgcctgcaggctaggacttcgcgaggtgggtcgactccccctccctcctcctcttcttcctcctcttcctcctcctcttgttcctcctcctcctcccgattttccctcctcggctggcgagggtggggggggcgggggaggccggggctcgccccgagcagccacgatgctcctggacgccggcccccagtacccagcgatcggcgtgaccacctttggcgcgtcccgccaccactccgcgggcgacgtggccgaacgagacgtgggcctgggcatcaacccgttcgccgacggcatgggcgccttcaagctcaaccccagttcgcacgagctggcttcggccggccagacggccttcacgtcgcaggcgccaggctacgcggctgctgcggccctgggccatcaccatcacccgggccacgtcggctcctattccagcgcagccttcaactccacgcgggactttctgttccgcaaccggggttttggcgacgcggcggcggcagccagcgcacagcacagcctctttgctgcatcggccgggggcttcgggggcccacacggccacacggacgccgcgggccacctcctcttccccgggcttcacgagcaggctgccggccacgcgtcgcctaacgtggtcaacgggcagatgaggctcggcttctcgggggacatgtacccgcgaccggagcagtacggccaggtgaccagcccgcgttcggagcactatgctgcgccgcagctgcacggctacgggcccatgaacgtgaacatggccgcgcatcacggcgccggcgccttcttccgctacatgcgccaacccatcaagcaagagctcatctgcaagtggatcgagcccgagcagctggccaaccccaaaaagtcgtgcaacaaaactttcagcaccatgcacgagctagttacgcacgtcaccgtggagcacgtaggtggcccggagcagagtaatcacatctgcttctgggaggagtgtccgcgcgagggcaagcccttcaaagccaaatacaaactggttaaccacatccgcgtgcacacgggcgagaagccctttccctgccccttccctggctgtggcaaggtcttcgcgcgctccgagaatttaaagatccacaaaaggacgcacacaggggagaagcccttcaagtgcgagtttgagggctgtgaccggcgcttcgctaacagcagcgaccgcaagaagcacatgcacgtgcacacgagcgacaagccctatctttgcaagatgtgcgacaagtcctacacgcatcccagttcgctgcgcaaacacatgaaggtccacgaatcctcctcgcagggctcgcagccttcgccggccgccagctctggctacgaatcctccacgcctcccaccatcgtgtctccctccacagacaacccgaccacaagctccttatcgccctcctcctccgcagtccaccacacagccggccacagtgcgctctcttccaattttaacgaatggtacgtttaaaatcagaaacaaaacatcgaacaaaaccctatttaagagactgatcacacacgtatacacaacattactgaaagaaccctgcgaatcaaaacaacccccacacagaccccgcaatccttttttaaaaaatctgccaatagacccaggacgagtaagagaggaagcatcaaccttttaaaaatttcctttcgctttcattatttttctttttttggcaaaggcttggtacccaaggtgcggtagggggtcgagggggaggaggccacctgaccaaatgccgccaaccccgagggccagtttcttgtcgaattggtacgggctctctggggcttcggcttctttttttctttgttttcttgtaaatacagaattattagcttaaaactgtactgttgaattctgtaaatagttatatctcggttggagcgggtgggtgggattgtggcgttgtggtctttgcattgggggaggggggagggaccggatgggcggggggagggggagggggaggggtgggcggccgaaagccaactgtttgtactgaatggcaagaatgttctagtaaatgtgtaccaaaatgtgaattactttgtacgattacagtctccacgtcgacctaacccaatattattggtattaatgtgctttttttgtataaagtgcaaacatttcgtcccaaagtctaagtactttagtgcagtaaaatgttgtttcatgtcctgtcaagaattcgtatagtacgagcctggatctgcgtgtcaaactgttccatttgtttatgtaaagtgatattaaaaaagatataaactataactgtccgttacttttggcaaaagatacaaccacataatgtatataattcctagtttccatatttatccgcatgtaaagggccggtttatccatgttacagctcttcaatatttatggctagaagaactcgtatgtacactttagtttccagaactgtttggtaacctttcgtaccttattaaagattcttaaatctccgtgattgtggtaggaatttcttcttcacccaccagcaacctgctgcctcttctgccagtcttaaagggtctccagaaaagctctccagtctcccttgccttccctttctgtcactgcaggtcgtataaacgtgataaatgaatgctaccctgctggctctccgagagagtgtaattagtatttatatcaaaatttatgaaacaaattttcggccgcagtataatttaaatgacctttgcagatgtagaataacaaccataaaaataacaggaatagattgcacaggcgacatcaatattaatgtagacgaattgtcagaagctcaggggctcgctctgcaacattgcaaatgaacttgcagccgagggttccgctgccccctagattaaattccccgggctgaaactgagttgcagatttacaatatcatattttaaattgctgtcttcaattaaaccatttatgaccataactaattttcaggatgtcgatgcatgcttttccaggccttccttctttgtacaaaagtaaatgtccataaagcgtttcacttatattcttcaaacatgatgctaatttaaattaattacttcctatgatatgttattattcctatgattttgccactgttattagttctctcaaaaatacatctagggaagaggattattttaagtaatttgattatctttctatctcttttatttatttctcatttacttaagaaattcgttccattggttggcattgatacagtaaatttgtaaatgaggagacaatataaaaaatctaaattacttgtgcttaatgactgtagcagaatgccttttctctaaatcagattgtctttcttgcagtttagtttgatagatttgcaagctatgctgcttccatgaagttagctgcgctggtaggaacgcaggcttctttgtctctggttgtagcttgcatgatcgccccattaggcagacaacgtagccggagatcacaaatcaggcccttggctgtagttgctagtgtgtggaggtgcagagcaggtggcagaaactgacctcactgggcaagggtggccatggacctgattctttaatgcactctatgtgttcaggaagccacaggccatatttgactctgagaaagaaaacaagaggaaaaaccccacaaagtataacaaccccttaagatacatctattttaaagtgaaattaatttttcagtttataccattggccaattacaagataaaaatgttcaatttctttaagaatcctttgttgacttgtcttttcatctcttgctatttatatttgtcactgtttcaacaaagtcttatttgctgaggaaggactttgctgcacttactgtaccacatcaaacactggggagggtggtgtttaactttttaaaaaatgttattctgattataacaataatattggcttttttcatgaaaagagcgccaccttgcaaggtttagtgagatttatggaagttgaatacctaagcaggaattgctgctagctccaaaaatttgcgaagcaaaagctagccccaattggtttggaagtttgaaactgattaacagatttgcatttgaagtgactccagacattaggtccagacattagttaaaaatagaaagaggaataaagacatctcttctctctagaaaagataacaccacaattaataatccttcccactttcattgagatcagcttgtctgataacctgatatgagtgtgataatgataaacatgataatagtggtacttttgtaattttgctggtgcatttaagaagatagtaaatgatgagttcatcttttcttcgaacattcctattcctagatgtagtttacctcaaattgggaattataactgtctaatttttgttgtgtacctgatgccccttttgctttaataccacagtgtaacaattaaatatcacactatgacatatgatttaagtaggatattttaaagataaattttaggggtaaatgtttacttcaaaatgactccatatttcaaatatctgtttagactgtgaaggccaaataatttttaagaaaacatttgaagagtagtgtgtttgcatttgtgaataatcttactcacagcaagtaaacgtaataaaagccaacatttaagccaa

SEQ ID NO: 214 - DNA, 641 bp, Artificial Sequence
  SPRR1B
accagttctaagggaccatacagagtattcctctcttcacaccaggaccagtcactgttgcagcatgagttcccagcagcagaagcagccttgcaccccaccccctcagcttcagcagcagcaggtgaaacagccttgccagcctccacctcaggaaccatgcatccccaaaaccaaggagccctgccaccccaaggtgcctgagccctgccaccccaaagtgcccgagccctgccagcccaaggttccagagccatgccaccccaaggtgcctgagccctgcccttcaatagtcactccagcaccagcccagcagaagaccaagcagaagtaatgtggtccacagccatgcccttgaggagccggccaccagatgctgaatcccctatcccattctgcgtatgagtcccatttgccttgcaattagcattctgtctcccccaaaaaagaatgtgctatgaagctttctttcctacacactctgagtctctgaatgaagctgaaggtcttagtaccagagctagttttcagctgctcagaattcatctgaagagagacttaagatgaaagcaaatgattcagctcccttatacccccattaaattcactttcaattccaaaaaaaaaaaaaaaaaaaaaaa

SEQ ID NO: 215 - DNA, 586 bp, Artificial Sequence
  S100A9
aaacactctgtgtggctcctcggctttgacagagtgcaagacgatgacttgcaaaatgtcgcagctggaacgcaacatagagaccatcatcaacaccttccaccaatactctgtgaagctggggcacccagacaccctgaaccagggggaattcaaagagctggtgcgaaaagatctgcaaaattttctcaagaaggagaataagaatgaaaaggtcatagaacacatcatggaggacctggacacaaatgcagacaagcagctgagcttcgaggagttcatcatgctgatggcgaggctaacctgggcctcccacgagaagatgcacgagggtgacgagggccctggccaccaccataagccaggcctcggggagggcaccccctaagaccacagtggccaagatcacagtggccacggccacggccacagtcatggtggccacggccacagccactaatcaggaggccaggccaccctgcctctacccaaccagggccccggggcctgttatgtcaaactgtcttggctgtggggctaggggctggggccaaataaagtctcttcctccaagtcaaaaaaaaaa

SEQ ID NO: 216 - DNA, 450 bp, Artificial Sequence
  S100A7
gtccaaacacacacatctcactcatccttctactcgtgacgcttcccagctctggctttttgaaagcaaagatgagcaacactcaagctgagaggtccataataggcatgatcgacatgtttcacaaatacaccagacgtgatgacaagattgagaagccaagcctgctgacgatgatgaaggagaacttccccaacttccttagtgcctgtgacaaaaagggcacaaattacctcgccgatgtctttgagaaaaaggacaagaatgaggataagaagattgatttttctgagtttctgtccttgctgggagacatagccacagactaccacaagcagagccatggagcagcgccctgttccgggggcagccagtgacccagccccaccaatgggcctccagagaccccaggaacaataaaatgtcttctcccaccagaaaaaaaaaaaa

SEQ ID NO: 217 - DNA, 5903 bp, Artificial Sequence
  NID1
gggaggcgggaggagagggggctgccaggggcgtccggttacatccccgccttcctctgtcctggccgcgggaccgggtttgcgggaccgcagttcgggaacatgttggcctcgagcagccggatccgggctgcgtggacgcgggcgctgctgctgccgctgctgctggcggggcctgtgggctgcctgagccgccaggagctctttcccttcggccccggacagggggacctggagctggaggacggggatgacttcgtctctcctgccctggagctgagtggggcgctccgcttctacgacagatccgacatcgacgcagtctacgtcaccacaaatggcatcattgctacgagtgaacccccggccaaagaatcccatcccgggctcttcccaccaacattcggtgcagtcgcccctttcctggcggacttggacacgaccgatggcctggggaaggtttattatcgagaagacttatccccctccatcactcagcgagcagcagagtgtgtccacagagggttcccggagatctctttccagcctagtagcgcggtggttgtcacttgggaatccgtggccccctaccaagggcccagcagggacccagaccagaaaggcaagagaaacacgttccaggctgttctagcctcctctgattccagctcctatgccattttcctttatcctgaggatggtctgcagttccatacgacattctcaaagaaggaaaacaaccaagttcctgccgtggttgcattcagtcaaggttcagtgggattcttatggaagagcaacggagcttataacatatttgctaatgacagggaatcagttgaaaatttggccaagagtagtaactctgggcagcagggtgtctgggtgtttgagattgggagtccagccaccaccaatggcgtggtgcctgcagacgtgatcctcggaactgaagatggggcagagtatgatgatgaggatgaagattatgacctggcgaccactcgtctgggcctggaggatgtgggcaccacgcccttctcctacaaggctctgagaaggggaggtgctgacacatacagtgtgcccagcgtcctctccccgcgccgggcagctaccgaaaggccccttggacctcccacagagagaaccaggtctttccagttggcagtggagacttttcaccagcagcaccctcaggtcatagatgtggatgaagttgaggaaacaggagttgttttcagctataacacggattcccgccagacgtgtgctaacaacagacaccagtgctcggtgcacgcagagtgcagggactacgccacgggcttctgctgcagctgtgtcgctggctatacgggcaatggcaggcaatgtgttgcagaaggttccccccagcgagtcaatggcaaggtgaaaggaaggatctttgtggggagcagccaggtccccattgtctttgagaacactgacctccactcttacgtagtaatgaaccacgggcgctcctacacagccatcagcaccattcccgagaccgttggatattctctgcttccactggccccagttggaggcatcattggatggatgtttgcagtggagcaggacggattcaagaatgggttcagcatcaccgggggtgagttcactcgccaggctgaggtgaccttcgtggggcacccgggcaatctggtcattaagcagcggttcagcggcatcgatgagcatgggcacctgaccatcgacacggagctggagggccgcgtgccgcagattccgttcggctcctccgtgcacattgagccctacacggagctgtaccactactccacctcagtgatcacttcctcctccacccgggagtacacggtgactgagcccgagcgagatggggcatctccttcacgcatctacacttaccagtggcgccagaccatcaccttccaggaatgcgtccacgatgactcccggccagccctgcccagcacccagcagctctcggtggacagcgtgttcgtcctgtacaaccaggaggagaagatcttgcgctatgctctcagcaactccattgggcctgtgagggaaggctcccctgatgctcttcagaatccctgctacatcggcactcatgggtgtgacaccaacgcggcctgtcgccctggtcccaggacacagttcacctgcgagtgctccatcggcttccgaggagacgggcgaacctgctatgatattgatgaatgttcagaacaaccctcagtgtgtgggagccacacaatctgcaataatcacccaggaaccttccgctgcgagtgtgtggagggctaccagttttcagatgagggaacgtgtgtggctgtcgtggaccagcgccccatcaactactgtgaaactggccttcataactgcgacataccccagcgggcccagtgtatctacacaggaggctcctcctacacctgttcctgcttgccaggcttttctggggatggccaagcctgccaagatgtagatgaatgccagccaagccgatgtcaccctgacgccttctgctacaacactccaggctctttcacgtgccagtgcaaacctggttatcagggagacggcttccgttgcgtgcccggagaggtggagaaaacccggtgccagcacgagcgagaacacattctcggggcagcgggggcgacagacccacagcgacccattcctccggggctgttcgttcctgagtgcgatgcgcacgggcactacgcgcccacccagtgccacggcagcaccggctactgctggtgcgtggatcgcgacggccgcgaggtggagggcaccaggaccaggcccgggatgacgcccccgtgtctgagtacagtggctcccccgattcaccaaggacctgcggtgcctaccgccgtgatccccttgcctcctgggacccatttactctttgcccagactgggaagattgagcgcctgcccctggagggaaataccatgaggaagacagaagcaaaggcgttccttcatgtcccggctaaagtcatcattggactggcctttgactgcgtggacaagatggtttactggacggacatcactgagccttccattgggagagctagtctacatggtggagagccaaccaccatcattagacaagatcttggaagtccagaaggtatcgctgttgatcaccttggccgcaacatcttctggacagactctaacctggatcgaatagaagtggcgaagctggacggcacgcagcgccgggtgctctttgagactgacttggtgaatcccagaggcattgtaacggattccgtgagagggaacctttactggacagactggaacagagataaccccaagattgaaacttcctacatggacggcacgaaccggaggatccttgtgcaggatgacctgggcttgcccaatggactgaccttcgatgcgttctcatctcagctctgctgggtggatgcaggcaccaatcgggcggaatgcctgaaccccagtcagcccagcagacgcaaggctctcgaagggctccagtatccttttgctgtgacgagctacgggaagaatctgtatttcacagactggaagatgaattccgtggttgctctcgatcttgcaatttccaaggagacggatgctttccaaccccacaagcagacccggctgtatggcatcaccacggccctgtctcagtgtccgcaaggccataactactgctcagtgaacaatggcggctgcacccacctatgcttggccaccccagggagcaggacctgccgttgccctgacaacaccttgggagttgactgtatcgaacagaaatgaagacaagagtgccttatttcctttccaagtatttcacagcaacactctacttgaagcaacttggtccagattgaaaagtgtcctctggctgagtggccactaggcccagacccagcccagcctgagccccaacaacttttccctcactgttccccaaaacatgcaccctggacttctctaatagaaaagtctccacccctacacaaggacagaaccctccacccctacccccaaccctcagacagacttatacacccctgagtgaggattacatgcccatcccagtgtcctaggaccttttcccaatactagccccccagtggtgaacagaacctcccaaatttgagttgcacccttccctgtggccttatgagctcagcctcgctttgaggtacccaccgtcctgtcagctccttgacctatgagccggggcctgactaggaaaagttgggagttaaggaggaaattagcattccttaatgttttgttttggtgctctgaatttcttctttattatagtcctatagttttactcctcagttcctcaccatcatcatcttgtctaagacccccattataatattcatgcgctgctttttcatcaaaacctaccctgtcctagagatctatgggcatttggtggatgataatgagcagcccctcccagatagaatgtcaatatttgagcagtaggatattggcatttgttagttaaaggcttaaatcaaaagaatgtccaatggtaggaatttcaaggtgtaggtcagatatttgagaataggggatttttttgatgtgccttaaattataccaaagattactaattattcctctttgcccaaaatacttgcatccaaggttctagtctctgttgctgtgctggtctttagccccactgcttgcactgatgtccctccttttcacggagacctatctgaggtacaggatggggctggcaccagatgatgtcccaccacagtccctcacctccggcctccacatgacagaaccaatttacactcaaccatgacctcacccctccttggtttctccctcgatctgtggccctttttggatgtattcttatctaacaacacaatccggaaagactgaattgaatatttatactaatggttcatatcctttattgctcaatgatctaattaaagggatcattgccacatttcatgtttatatttctacaatttgtttagaaaacatctcctgaccatatcagtagctcgtgttatctttttatcaactgcttcccagagtcctaaaacaatagaaattttggattgaaaagttcagcataaggagtttgagtcagtaaaggatgggataaaggagtcgagatgattcaatgaaaagtatcacaaaaaagagattgatcaacaagagaaataaaaaagcccaagaggaagtggtaggggaaggaatttaagaacagcaataagtaaaactcttaagtaactccaaaaagaaaatggtacattttgccaaagaccacttatacttgagaacatggaagaatttgcctgatactctctttggggaaaagagtctctcctcttttcctcaaaccccagtacactcagcctctctgccccaccttctcctgactttgtcctcacttgcttctgcagtacattggaacctgaattgaaagaaagtcttccttgaataattggagtttgtcttgagaggcaaatatagccccaagaatcacaagattcgaggaccatgtaggtcttttacgtagcccaaatccataaattagtctcactttttgtatttatcgtttcatattaaaccctctatatcaaatgttcatcatgattttgtatgatttttataactattttattcattttattagatttattctaaaattttttaatggtaaattcttaaactgtggaaaccactgaaggtgcttattaactgttctcccagatttgtacaagtattggatgattccttgagtttacagctgtacaaatagtgtggaaaataaactttttttaaaaaagaaaaaaaaaaaaaaaaaaaaaaaa

SEQ ID NO: 218 - DNA, 3455 bp, Artificial Sequence
  COL6A2
gcttactcggcgcccgcgcctcgggccgtcgggagcggagcctcctcgggaccaggacttcagggccacaggtgctgccaagatgctccagggcacctgctccgtgctcctgctctggggaatcctgggggccatccaggcccagcagcaggaggtcatctcgccggacactaccgagagaaacaacaactgcccagagaagaccgactgccccatccacgtgtacttcgtgctggacacctcggagagcgtcaccatgcagtcccccacggacatcctgctcttccacatgaagcagttcgtgccgcagttcatcagccagctgcagaacgagttctacctggaccaggtggcgctgagctggcgctacggcggcctgcacttctctgaccaggtggaggtgttcagcccaccgggcagcgaccgggcctccttcatcaagaacctgcagggcatcagctccttccgccgcggcaccttcaccgactgcgcgctggccaacatgacggagcagatccggcaggaccgcagcaagggcaccgtccacttcgccgtggtcatcaccgacggccacgtcaccggcagcccctgcgggggcatcaagctgcaggccgagcgggcccgcgaggagggcatccggctcttcgccgtggcccccaaccagaacctgaaggagcagggcctgcgggacatcgccagcacgccgcacgagctctaccgcaacgactacgccaccatgctgcccgactccaccgagatcgaccaggacaccatcaaccgcatcatcaaggtcatgaaacacgaagcctacggagagtgctacaaggtgagctgcctggaaatccctgggccctctggccccaagggctaccgtggacagaagggtgccaagggcaacatgggtgagccgggagagcctggccagaagggaagacagggagacccgggcatcgaaggccccattggattcccaggacccaagggcgttcctggcttcaaaggagagaagggtgaatttggagccgacggtcgcaagggggcccctggcctggctggcaagaacgggaccgatggacagaagggcaagctggggcgcatcggacctcctggctgcaagggagaccctggaaaccggggccccgacggttacccgggggaagcagggagtccaggggagcgaggagaccaaggcggcaagggggaccctggccgcccaggacgcagagggcccccgggagaaatcggggccaagggaagcaaggggtatcaaggcaacagtggagccccaggaagtcctggtgtgaaaggagccaagggcgggcctgggccccgcggacccaaaggcgagccggggcgcaggggagaccccggcaccaagggcagcccaggcagcgatggccccaagggggagaagggggaccctggccctgaggggccccgcggcctggctggagaggttggcaacaaaggagccaagggagaccgaggcttgcctggacccagaggcccccagggagctcttggggagcccggaaagcagggatctcggggagaccccggtgatgcaggaccccgtggagactcaggacagccaggccccaagggagaccccggcaggcctggattcagctacccaggaccccgaggagcacccggagaaaaaggcgagcccggcccacgcggccccgagggaggccgaggcgactttggcttgaaaggagaacctgggaggaaaggagagaaaggagagcctgcggatcctggtccccctggtgagccaggccctcgggggccaagaggagtcccaggacccgagggtgagcccggcccccctggagaccccggtctcacggagtgtgacgtcatgacctacgtgagggagacctgcgggtgctgcgactgtgagaagcgctgtggcgccctggacgtggtcttcgtcatcgacagctccgagagcattgggtacaccaacttcacactggagaagaacttcgtcatcaacgtggtcaacaggctgggtgccatcgctaaggaccccaagtccgagacagggacgcgtgtgggcgtggtgcagtacagccacgagggcacctttgaggccatccagctggacgacgaacgtatcgactccctgtcgagcttcaaggaggctgtcaagaacctcgagtggattgcgggcggcacctggacaccctcagccctcaagtttgcctacgaccgcctcatcaaggagagccggcgccagaagacacgtgtgtttgcggtggtcatcacggacgggcgccacgaccctcgggacgatgacctcaacttgcgggcgctgtgcgaccgcgacgtcacagtgacggccatcggcatcggggacatgttccacgagaagcacgagagtgaaaacctctactccatcgcctgcgacaagccacagcaggtgcgcaacatgacgctgttctccgacctggtcgctgagaagttcatcgatgacatggaggacgtcctctgcccggaccctcagatcgtgtgcccagaccttccctgccaaacagagctgtccgtggcacagtgcacgcagcggcccgtggacatcgtcttcctgctggacggctccgagcggctgggtgagcagaacttccacaaggcccggcgcttcgtggagcaggtggcgcggcggctgacgctggcccggagggacgacgaccctctcaacgcacgcgtggcgctgctgcagtttggtggccccggcgagcagcaggtggccttcccgctgagccacaacctcacggccatccacgaggcgctggagaccacacaatacctgaactccttctcgcacgtgggcgcaggcgtggtgcacgccatcaatgccatcgtgcgcagcccgcgtggcggggcccggaggcacgcagagctgtccttcgtgttcctcacggacggcgtcacgggcaacgacagtctgcacgagtcggcgcactccatgcgcaagcagaacgtggtacccaccgtgctggccttgggcagcgacgtggacatggacgtgctcaccacgctcagcctgggtgaccgcgccgccgtgttccacgagaaggactatgacagcctggcgcaacccggcttcttcgaccgcttcatccgctggatctgctagcgccgccgcccgggccccgcagtcgagggtcgtgagcccaccccgtccatggtgctaagcgggcccgggtcccacacggccagcaccgctgctcactcggacgacgccctgggcctgcacctctccagctcctcccacggggtccccgtagccccggcccccgcccagccccaggtctccccaggccctccgcaggctgcccggcctccctccccctgcagccatcccaaggctcctgacctacctggcccctgagctctggagcaagccctgacccaataaaggctttgaacccataaaaaaaaaaaaaaaa

SEQ ID NO: 219 - DNA, 4628 bp, Artificial Sequence
  EREG
tcacttgcctgatatttccagtgtcagagggacacagccaacgtggggtcccttctaggctgacagccgctctccagccactgccgcgagcccgtctgctcccgccctgcccgtgcactctccgcagccgccctccgccaagccccagcgcccgctcccatcgccgatgaccgcggggaggaggatggagatgctctgtgccggcagggtccctgcgctgctgctctgcctgggtttccatcttctacaggcagtcctcagtacaactgtgattccatcatgtatcccaggagagtccagtgataactgcacagctttagttcagacagaagacaatccacgtgtggctcaagtgtcaataacaaagtgtagctctgacatgaatggctattgtttgcatggacagtgcatctatctggtggacatgagtcaaaactactgcaggtgtgaagtgggttatactggtgtccgatgtgaacacttctttttaaccgtccaccaacctttaagcaaagaatatgtggctttgaccgtgattcttattattttgtttcttatcacagtcgtcggttccacatattatttctgcagatggtacagaaatcgaaaaagtaaagaaccaaagaaggaatatgagagagttacctcaggggatccagagttgccgcaagtctgaatggcgccatcaaacttatgggcagggataacagtgtgcctggttaatattaatattcccattttattaataatatttatgttgggtcaagtgttaggtcaataacactgtattttaatgtacttgaaaaatgtttttatttttgttttatttttgacagactatttgctaatgtataatgtgcagaaaatatttaatatcaaaagaaaattgatatttttatacaagtaatttcctgagctaaatgcttcattgaaagcttcaaagtttatatgcctggtgcacagtgcttagaagtaagcaattcccaggtcatagctcaagaattgttagcaaatgacagatttctgtaagcctatatatatagtcaaatcgatttagtaagtatgttttttatgttcctcaaatcagtgataattggtttgactgtaccatggtttgatatgtagttggcaccatggtatcatatattaaaacaataatgcaattagaatttgggagaagcaaatataggtcctgtgttaaacactacacatttgaaacaagctaaccctggggagtctatggtctcttcactcaggtctcagctataattctgttatatgaggggcagtggacagttccctatgccaactcacgactcctacaggtactagtcactcatctaccagattctgcctatgtaaaatgaattgaaaaacaattttctgtaatcttttatttaagtagtgggcatttcatagcttcacaatgttccttttttgtatattacaacatttatgtgaggtaattattgctcaacagacaattagaaaaaagtccacacttgaagcctaaatttgtgctttttaagaatatttttagactatttctttttataggggctttgctgaattctaacattaaatcacagcccaaaatttgatggactaattattattttaaaatatatgaagacaataattctacatgttgtcttaagatggaaatacagttatttcatcttttattcaaggaagttttaactttaatacagctcagtaaatggcttcttctagaatgtaaagttatgtatttaaagttgtatcttgacacaggaaatgggaaaaaacttaaaaattaatatggtgtatttttccaaatgaaaaatctcaattgaaagcttttaaaatgtagaaacttaaacacaccttcctgtggaggctgagatgaaaactagggctcattttcctgacatttgtttattttttggaagagacaaagatttcttctgcactctgagcccataggtctcagagagttaataggagtatttttgggctattgcataaggagccactgctgccaccacttttggattttatgggaggctccttcatcgaatgctaaacctttgagtagagtctccctggatcacataccaggtcagggaggatctgttcttcctctacgtttatcctggcatgtgctagggtaaacgaaggcataataagccatggctgacctctggagcaccaggtgccaggacttgtctccatgtgtatccatgcattatataccctggtgcaatcacacgactgtcatctaaagtcctggccctggcccttactattaggaaaataaacagacaaaaacaagtaaatatatatggtcatatacatattgtatatatattcatatacaaacatgtatgtatacatgaccttaatggatcatagaattgcagtcatttggtgctctgctaaccatttatataaaacttaaaaacaagagaaaagaaaaatcaattagatctaaacagttatttctgtttcctatttaatacagctgaagtcaaaatatgtaagaacacattttaaatactctacttacagttggccctctgtggttagttccacatctgtggattcaaccaaccaaggacggaaaatgcttaaaaaataatacaacaacaacaaaaaatacattataacaactatttacttttttttttttctttttgagatggagtctcgctctgttgcccaggttggagtgcagtggcacgatctcggctcactgcaacctcacctcccgggttcaagagatcctcctgcctcagcctcctgagcagctgggactacaggcgcatgccaccatgcccagctaatttttgtatttttagtagaggcggggtttcaccatgttggccaggatggtctcaatctcctaaccttgagatccaccctccacagcctcccaaactgctgggattacaggtgtgagccaccgcacgtagcatttacattaggtattacaagtaatgtaaagatgatttaagtatacaggaggatgtgaataggttatatgcaagcactatgcccttttatataagtgacttgaacatctgtgcccgattttagtatgtgcaggggggcgatctgggaatcagtcccctgtggataccaaggtacaactgtatttattaacgcttactagatgtgaggagagtctgaatattttcagtgatcttggctgtttcaaaaaaatctattgacttttcaataaatcagctgcaatccatttatttcatttacaaaagatttattgtaagcatctcaatcttggtttgtcagtttatcttaagcatgtcaattcataaaaacaagtcatttttgtatttttcatctttaagaatgcttaaaaaagctaatccctaaaatagttagatctttgtaaatgcatattaaataataaagtatgacccacattactttttatgggtgaaaataagacaaaaataatagttttagtgaggatggtgctgagtaaacataaaaactgatttgctctcagctgatgtgtcctgtacacagtgggaagattttagttcacacttagtctaactcccccattttacagatttctcactatatatatttctagaaggggctatgcatattcaatgtattgagaaccaaagcaaccacaaatgcataaatgcataatttatggtcttcaaccaaggccacataataacccagttaacttactctttaaccaggaatattaagttctataactagtactcaaggtttaaccttaaaattaagatttccttaaccttaaccttaaaattgatattatattaaacatacataatacaatgtaactccactgttctcctgaatattttttgctctaatctctctgccgaaagtcaaagtgatgggagaattggtatactggtatgactacgtcttaagtcagatttttatttatgagtctttgagactaaattcaatcaccaccaggtatcaaatcaacttttatgcagcaaatatatgattctagtgtctgacttttgttaaattcagtaatgcagtttttaaaaacctgtatctgacccactttgtaatttttgctccaatatccattctgtagacttttgaaaaaaaagtttttaatttgatgcccaatatattctgaccgttaaaaaattcttgttcatatgggagaagggggagtaatgacttgtacaaacagtatttctggtgtatattttaatgtttttaaaaagagtaatttcatttaaatatctgttattcaaatttgatgatgttaaatgtaatataatgtattttctttttattttgcactctgtaattgcactttttaagtttgaagagccattttggtaaacggtttttattaaagatgctatggaacataaagttgtattgcatgcaatttgaagtaacttatttgactatgaatgttatcggattactgaattgtatcaatttgtttgtgttcaatatcagctttgataattgtgtaccttaagatattgaaggagaaaatagataatttacaagatattattaatttttatttatttttcttgggaattgaaaaaaattgaaataaataaaaatgcattgaacatcttgcattcaaaatcttcactgac

SEQ ID NO: 220 - DNA, 5561 bp, Artificial Sequence
  DSG3
aaagcagcagagacgctgcagagggcttttcttagacatcaactgcagacggctggcaggatagaagcagcggctcacttggactttttcaccagggaaatcagagacaatgatggggctcttccccagaactacaggggctctggccatcttcgtggtggtcatattggttcatggagaattgcgaatagagactaaaggtcaatatgatgaagaagagatgactatgcaacaagctaaaagaaggcaaaaacgtgaatgggtgaaatttgccaaaccctgcagagaaggagaagataactcaaaaagaaacccaattgccaagattacttcagattaccaagcaacccagaaaatcacctaccgaatctctggagtgggaatcgatcagccgccttttggaatctttgttgttgacaaaaacactggagatattaacataacagctatagtcgaccgggaggaaactccaagcttcctgatcacatgtcgggctctaaatgcccaaggactagatgtagagaaaccacttatactaacggttaaaattttggatattaatgataatcctccagtattttcacaacaaattttcatgggtgaaattgaagaaaatagtgcctcaaactcactggtgatgatactaaatgccacagatgcagatgaaccaaaccacttgaattctaaaattgccttcaaaattgtctctcaggaaccagcaggcacacccatgttcctcctaagcagaaacactggggaagtccgtactttgaccaattctcttgaccgagagcaagctagcagctatcgtctggttgtgagtggtgcagacaaagatggagaaggactatcaactcaatgtgaatgtaatattaaagtgaaagatgtcaacgataacttcccaatgtttagagactctcagtattcagcacgtattgaagaaaatattttaagttctgaattacttcgatttcaagtaacagatttggatgaagagtacacagataattggcttgcagtatatttctttacctctgggaatgaaggaaattggtttgaaatacaaactgatcctagaactaatgaaggcatcctgaaagtggtgaaggctctagattatgaacaactacaaagcgtgaaacttagtattgctgtcaaaaacaaagctgaatttcaccaatcagttatctctcgataccgagttcagtcaaccccagtcacaattcaggtaataaatgtaagagaaggaattgcattccgtcctgcttccaagacatttactgtgcaaaaaggcataagtagcaaaaaattggtggattatatcctgggaacatatcaagccatcgatgaggacactaacaaagctgcctcaaatgtcaaatatgtcatgggacgtaacgatggtggatacctaatgattgattcaaaaactgctgaaatcaaatttgtcaaaaatatgaaccgagattctactttcatagttaacaaaacaatcacagctgaggttctggccatagatgaatacacgggtaaaacttctacaggcacggtatatgttagagtacccgatttcaatgacaattgtccaacagctgtcctcgaaaaagatgcagtttgcagttcttcaccttccgtggttgtctccgctagaacactgaataatagatacactggcccctatacatttgcactggaagatcaacctgtaaagttgcctgccgtatggagtatcacaaccctcaatgctacctcggccctcctcagagcccaggaacagatacctcctggagtataccacatctccctggtacttacagacagtcagaacaatcggtgtgagatgccacgcagcttgacactggaagtctgtcagtgtgacaacaggggcatctgtggaacttcttacccaaccacaagccctgggaccaggtatggcaggccgcactcagggaggctggggcctgccgccatcggcctgctgctccttggtctcctgctgctgctgttggccccccttctgctgttgacctgtgactgtggggcaggttctactgggggagtgacaggtggttttatcccagttcctgatggctcagaaggaacaattcatcagtggggaattgaaggagcccatcctgaagacaaggaaatcacaaatatttgtgtgcctcctgtaacagccaatggagccgatttcatggaaagttctgaagtttgtacaaatacgtatgccagaggcacagcggtggaaggcacttcaggaatggaaatgaccactaagcttggagcagccactgaatctggaggtgctgcaggctttgcaacagggacagtgtcaggagctgcttcaggattcggagcagccactggagttggcatctgttcctcagggcagtctggaaccatgagaacaaggcattccactggaggaaccaataaggactacgctgatggggcgataagcatgaattttctggactcctacttttctcagaaagcatttgcctgtgcggaggaagacgatggccaggaagcaaatgactgcttgttgatctatgataatgaaggcgcagatgccactggttctcctgtgggctccgtgggttgttgcagttttattgctgatgacctggatgacagcttcttggactcacttggacccaaatttaaaaaacttgcagagataagccttggtgttgatggtgaaggcaaagaagttcagccaccctctaaagacagcggttatgggattgaatcctgtggccatcccatagaagtccagcagacaggatttgttaagtgccagactttgtcaggaagtcaaggagcttctgctttgtccacctctgggtctgtccagccagctgtttccatccctgaccctctgcagcatggtaactatttagtaacggagacttactcggcttctggttccctcgtgcaaccttccactgcaggctttgatccacttctcacacaaaatgtgatagtgacagaaagggtgatctgtcccatttccagtgttcctggcaacctagctggcccaacgcagctacgagggtcacatactatgctctgtacagaggatccttgctcccgtctaatatgaccagaatgagctggaataccacactgaccaaatctggatctttggactaaagtattcaaaatagcatagcaaagctcactgtattgggctaataatttggcacttattagcttctctcataaactgatcacgattataaattaaatgtttgggttcataccccaaaagcaatatgttgtcactcctaattctcaagtactattcaaattgtagtaaatcttaaagtttttcaaaaccctaaaatcatattcgccaggaaattttcctaaacattcttaagcttctatttttcccctgccaaaggaaggtgtttatcattttaaaatgcaatgtgatttagtggattaagcaggagcgctggttcttgtctccattgccttttcttatatcattgataatgatgtaagaatcacaaggggccgggcgcggtggctcacgcctgtaatcccagcactttgggaggccgaggcaggtggatcatgaggtcaggagatcgagaccatcctggctaacaaggtgaaaccccgtctctactaaaaatacaaaaaattagccgggcgcagtggcgggcgcctgtagtcccagctactcgggaggctgaggcaggagaatggcatgaacccgggaagcggagcttgcagtgagccgagattgcgccactgcagtccgcagtccggcctgggcgacagagcgagactccgtctcaaaaaaaaaaaaaaaaaaagaatcacaaggtatttgctaaagcattttgagctgcttggaaaaagggaagtagttgcagtagagtttcttccatcttcttggtgctgggaagccatatatgtgtcttttactcaagctaaggggtataagcttatgtgttgaatttgctacatctatatttcacatattctcacaataagagaattttgaaatagaaatatcatagaacatttaagaaagtttagtataaataatattttgtgtgttttaatccctttgaagggatctatccaaagaaaatattttacactgagctccttcctacacgtctcagtaacagatcctgtgttagtctttgaaaatagctcattttttaaatgtcagtgagtagatgtagcatacatatgatgtataatgacgtgtattatgttaacaatgtctgcagattttgtaggaatacaaaacatggccttttttataagcaaaacgggccaatgactagaataacacatagggcaatctgtgaatatgtattataagcagcattccagaaaagtagttggtgaaataattttcaagtcaaaaagggatatggaaagggaattatgagtaacctctattttttaagccttgcttttaaattaaacagctacagccatttaagccttgaggataataaagcttgagagtaataatgttaggttagcaaaggtttagatgtatcacttcatgcatgctaccatgatagtaatgcagctcttcgagtcatttctggtcattcaagatattcacccttttgcccatagaaagcaccctacctcacctgcttactgacattgtcttagctgatcacaagatcattatcagcctccattattccttactgtatataaaatacagagttttatattttcctttcttcgtttttcaccatattcaaaacctaaatttgtttttgcagatggaatgcaaagtaatcaagtgtttgtgctttcacctagaagggtgtggtcctgaaggaaagaggtcccctaaatatcccccaccctggtgctcctccctctccctggtaccctgactaccaggaagtcaggtgctagagcagctggagaagtgcaggcagcctgtgcttccacagatgggggtgctgctgcaacaaggctttcaatgtgcccatcttaggtgggagaagctagatcctgtgcagcagcctggtaagtcctgaggaggttccattgctcttcctgctgctgtcctttgcttctcaacggtggctcgctctacagtctagagcacatgcagctaacttgtgcctctgcttatgcatgagggttaaattaacaaccataaccttcatttgaagttcaaaggtgtattcaggatcctcaaagcattttaaccttgccgcttaaaacccaatttaccgtgaaatgggaattttgctgcattgttaaactgtagtggaaaccatgctatagtaataaaggttatataagagagaaattgaaattaaatgtgtttttaaatttcaaaaaaaaatcaatctttaggatgacttaaaaattgatttgccatgtaaaatgtatctgcattttttacacaaaacttgttttaagcataaaattttaaaactgtactacttgatgtattatacattttgaaccatatgtattaaaccataaacagtataatgttgttataataaaacaggcaataaatttataaataaaagctgaaaaaaaaaaaa

SEQ ID NO: 221 - DNA, 426 bp, Artificial Sequence
  PRM1
gactcacagcccacagagttccacctgctcacaggttggctggctcagccaaggtggtgccctgctctgagcattcaggccaagcccatcctgcaccatggccaggtacagatgctgtcgcagccagagccggagcagatattaccgccagagacaaagaagtcgcagacgaaggaggcggagctgccagacacggaggagagccatgaggtgctgccgccccaggtacagaccgcgatgtagaagacactaattgcacaaaatagcacatccaccaaactcctgcctgagaatgttaccagacttcaagatcctcttgccacatcttgaaaatgccaccatccaataaaaatcaggagcctgctaaggaacaatgccgcctgtcaataaatgttgaaaagtcatcccaaaaaaaaaaaaaaaaaa

SEQ ID NO: 222 - DNA, 1693 bp, Artificial Sequence
  KRT13
cacagtcctcggcccaggccaagcaagcttctatctgcacctgctctcaatcctgctctcaccatgagcctccgcctgcagagctcctctgccagctatggaggtggtttcgggggtggctcttgccagctgggaggaggccgtggtgtctctacctgttcaactcggtttgtgtctgggggatcagctgggggctatggaggcggcgtgagctgtggttttggtggaggggctggtagtggctttggaggtggctatggaggtggccttggaggtggctatggaggtggccttggaggtggctttggtgggggttttgctggtggctttgttgactttggtgcttgtgatggcggcctcctcactggcaatgagaagatcaccatgcagaacctcaacgaccgcctggcttcctacctggagaaggtgcgcgccctggaggaggccaacgctgacctggaggtgaagatccgtgactggcacctgaagcagagcccagctagccctgagcgggactacagcccctactacaagaccattgaagagctccgggacaagatcctgaccgccaccattgaaaacaaccgggtcatcctggagattgacaatgccaggctggctgcggacgacttcaggctcaagtatgagaatgagctggccctgcgccagagcgtggaggccgacatcaacggcctgcgccgggtgctggatgagctcactctgtctaagactgacctggagatgcagatcgagagcctgaatgaagagctagcctacatgaagaagaaccatgaagaggagatgaaggaatttagcaaccaggtggtcggccaggtcaacgtggagatggatgccaccccaggcattgacctgacccgcgtgctggcagagatgagggagcagtacgaggccatggcagagaggaaccgccgggatgctgaggaatggttccacgccaagagtgcagagctgaacaaggaggtgtctaccaacactgccatgattcagaccagcaagacagagatcacggagctcaggcgcacgctccaaggcctggagattgagctgcagtcccagctgagcatgaaagcggggctggagaacacggtggcagagacggagtgccgctatgccctgcagctgcagcagatccagggactcatcagcagcatcgaggcccagctgagcgagctccgcagtgagatggagtgccagaaccaagagtacaagatgctgctggacatcaagacacgtctggagcaggagatcgccacctaccgcagcctgctcgagggccaggacgccaagaagcgtcagcccccgtagcacctctgttaccacgacttctagtgcctctgttaccaccacctctaatgcctctggtcgccgcacttctgatgtccgtaggccttaaatctgcctggcgtcccctccctctgtcttcagcacccagaggaggagagagccggcagttccctgcaggagagaggaggggctgctggacccaaggctcagtccctctgctctcaggaccccctgtcctgactctctcctgatggtgggccctctgtgctcttctcttccggtcggatctctctcctctctgacctggatacgctttggtttctcaacttctctaccccaaagaaaagattattcaataaagtttcctgcctttctgcaaacataaaaa

SEQ ID NO: 223 - DNA, 1490 bp, Artificial Sequence
  KRT19
agatatccgcccctgacaccattcctcccttcccccctccaccggccgcgggcataaaaggcgccaggtgagggcctcgccgctcctcccgcgaatcgcagcttctgagaccagggttgctccgtccgtgctccgcctcgccatgacttcctacagctatcgccagtcgtcggccacgtcgtccttcggaggcctgggcggcggctccgtgcgttttgggccgggggtcgcctttcgcgcgcccagcattcacgggggctccggcggccgcggcgtatccgtgtcctccgcccgctttgtgtcctcgtcctcctcgggggcctacggcggcggctacggcggcgtcctgaccgcgtccgacgggctgctggcgggcaacgagaagctaaccatgcagaacctcaacgaccgcctggcctcctacctggacaaggtgcgcgccctggaggcggccaacggcgagctagaggtgaagatccgcgactggtaccagaagcaggggcctgggccctcccgcgactacagccactactacacgaccatccaggacctgcgggacaagattcttggtgccaccattgagaactccaggattgtcctgcagatcgacaatgcccgtctggctgcagatgacttccgaaccaagtttgagacggaacaggctctgcgcatgagcgtggaggccgacatcaacggcctgcgcagggtgctggatgagctgaccctggccaggaccgacctggagatgcagatcgaaggcctgaaggaagagctggcctacctgaagaagaaccatgaggaggaaatcagtacgctgaggggccaagtgggaggccaggtcagtgtggaggtggattccgctccgggcaccgatctcgccaagatcctgagtgacatgcgaagccaatatgaggtcatggccgagcagaaccggaaggatgctgaagcctggttcaccagccggactgaagaattgaaccgggaggtcgctggccacacggagcagctccagatgagcaggtccgaggttactgacctgcggcgcacccttcagggtcttgagattgagctgcagtcacagctgagcatgaaagctgccttggaagacacactggcagaaacggaggcgcgctttggagcccagctggcgcatatccaggcgctgatcagcggtattgaagcccagctgggcgatgtgcgagctgatagtgagcggcagaatcaggagtaccagcggctcatggacatcaagtcgcggctggagcaggagattgccacctaccgcagcctgctcgagggacaggaagatcactacaacaatttgtctgcctccaaggtcctctgaggcagcaggctctggggcttctgctgtcctttggagggtgtcttctgggtagagggatgggaaggaagggacccttacccccggctcttctcctgacctgccaataaaaatttatggtccaagggaaaaaaaaaaaaaaaaaaaa

SEQ ID NO: 224 - DNA, 415 bp, Artificial Sequence
  TNP1
gcccctcattttggcagaacttaccatgtcgaccagccgcaaattaaagagtcatggcatgaggaggagcaagagccgatctcctcacaagggagtcaagagaggtggcagcaaaagaaaataccgtaagggcaacctgaaaagtaggaaacggggcgatgacgccaatcgcaattaccgctcccacttgtgagcccccagcgggctctgccctggtgcgcttcacacagcaccaagcagcaacaagaacagcagaaggggaactgccaaggagacctgatgttagatcaaagccagagaggagcctatggaatgtggatcaaatgccagttgtgacgaaatgaggaatgtatatgttggctgtttttccccaacatctcaataaaactttgaaagcagaaaaaaaaaaaaaaaa

SEQ ID NO: 225 - DNA, 3023 bp, Artificial Sequence
  TEAD3
tcctcaacacaaactttccgtcccgctcgctccctcctccgcgctcggcgcctcccgctccagcccggctcattccgcacattccggccagccccctccccacgaccccccttccccggccccccttgcggctccctcgggcccggcggagcggcccggccggagcgcccccgcgagctcggaccaggctcagccgcccagtgggctcaggcccagagcccagagcaaccagcacaatagcgtccaacagctggaacgccagcagcagccccggggaggcccgggaggatgggcccgagggcctggacaaggggctggacaacgatgcggagggcgtgtggagcccggacatcgagcagagcttccaggaggccctggccatctacccgccctgcggccggcggaagatcatcctgtcagacgagggcaagatgtacggccgaaatgagttgattgcacgctatattaaactgaggacggggaagactcggacgagaaaacaggtgtccagccacatacaggttctagctcggaagaaggtgcgggagtaccaggttggcatcaaggccatgaacctggaccaggtctccaaggacaaagcccttcagagcatggcgtccatgtcctctgcccagatcgtctctgccagtgtcctgcagaacaagttcagcccaccttcccctctgccccaggccgtcttctccacttcctcgcggttctggagcagcccccctctcctgggacagcagcctggaccctctcaggacatcaagccctttgcacagccagcctaccccatccagccgcccctgccgccgacgctcagcagttatgagcccctggccccgctcccctcagctgctgcctctgtgcctgtgtggcaggaccgtaccattgcctcctcccggctgcggctcctggagtattcagccttcatggaggtgcagcgagaccctgacacgtacagcaaacacctgtttgtgcacatcggccagacgaaccccgccttctcagacccacccctggaggcagtagatgtgcgccagatctatgacaaattccccgagaaaaagggaggattgaaggagctctatgagaaggggccccctaatgccttcttccttgtcaagttctgggccgacctcaacagcaccatccaggagggcccgggagccttctatggggtcagctctcagtacagctctgctgatagcatgaccatcagcgtctccaccaaggtgtgctcctttggcaaacaggtggtagagaaggtggagactgagtatgccaggctggagaacgggcgctttgtgtaccgtatccaccgctcgcccatgtgcgagtacatgatcaacttcatccacaagctgaagcacctgcccgagaagtacatgatgaacagcgtgctggagaacttcaccatcctgcaggtggtcacgagccgggactcccaggagaccctgcttgtcattgcttttgtcttcgaagtctccaccagtgagcacggggcccagcaccatgtctacaagctcgtcaaagactagggtgccctctgcgcctccttaaggatgcagggtgagcatctcctctccacacctgcctggcacccctgggggggtccaggattgaggattcatctacctgccaggcctcaggcccaggacccaggaggcctccccacctaccccagcacacacactccctgccactgttctgcgctttaattgtgggagaagagaggagaggagggctcagcggtggggcagcctgtccggggcgctgacccaccatcaccctgctctgcccagcctcgcgtgacctcagagaggtggggataggggacaccttcagcctccagcatgtgtggccactgtacccccacccacccttgggggagcatgatgggcaggtgagggcaggatggagaccaagggagtcagtgagcagaggccctgggagtgtccggttggggttggactgaggacagaggggcccacacttccttgcccctttgtgtcccaggcctggtgcccagactccttgcatggcttgtgtggtcctcagactccgcacagcgagcgtaggtctctgggtttcagatgaagtgcccaggctccaggaagttgagggacccacaggagaggtgggcagagctggagttctcatccagggctgcttgtccccagagcccaggtttatactacctccctggggcgggggctggccgcagggtaggggagaggctctgcagtgtggagtggagcctcatcgaggggcgctgggttaggggagcacctgtttcagactgggcatgaagaagggagcacagcagctactagaccccattagcacctcattagcccacaagccagccaggggccccaggaagatggggcaccccccagcaccctccagattgagagcaaggtagaggaaggagtcccagcctctgggcagaccagaggcccagagggagagagtagcagaaggcttttgatttttctcttgcctgaggcttgaatctgacaaacccttggtgggcactgctcccttaggttcttccccacctcaatctacctgcctagagtagcagctcccagacccagttctgggactgaaggttaacccttcacctgctgtcccttcttaacacccaggcccccagagccagctgggcctgtccagcagccacctgtgggtatttatgagtttcatatgaagtactgtgccccttcccttcctcatcccgaccctgcccgagcttcctgaaggtcctcactgtttgcatatcgctcaggccacctccaaaccccacctaggttttataatgtatattatatatttttttgtgtatttttaaaatccagctgtgatgggttatatcataaatgcagcttggggttggagcaggggccctcaaaggcccagctcctgctcaaaaaaaaaaaaaaaaaaaaattaaagttatttgtttgtgggtcagtcatgtaaaaaaaaaaaaaaaaaaaaaaaaaaaaaaaaaa

SEQ ID NO: 226 - DNA, 1234 bp, Artificial Sequence
  CXCL2
gagctccgggaatttccctggcccgggactccgggctttccagccccaaccatgcataaaaggggttcgccgttctcggagagccacagagcccgggccacaggcagctccttgccagctctcctcctcgcacagccgctcgaaccgcctgctgagccccatggcccgcgccacgctctccgccgcccccagcaatccccggctcctgcgggtggcgctgctgctcctgctcctggtggccgccagccggcgcgcagcaggagcgcccctggccactgaactgcgctgccagtgcttgcagaccctgcagggaattcacctcaagaacatccaaagtgtgaaggtgaagtcccccggaccccactgcgcccaaaccgaagtcatagccacactcaagaatgggcagaaagcttgtctcaaccccgcatcgcccatggttaagaaaatcatcgaaaagatgctgaaaaatggcaaatccaactgaccagaaggaaggaggaagcttattggtggctgttcctgaaggaggccctgcccttacaggaacagaagaggaaagagagacacagctgcagaggccacctggattgcgcctaatgtgtttgagcatcacttaggagaagtcttctatttatttatttatttatttatttgtttgttttagaagattctatgttaatattttatgtgtaaaataaggttatgattgaatctacttgcacactctcccattatatttattgtttattttaggtcaaacccaagttagttcaatcctgattcatatttaatttgaagatagaaggtttgcagatattctctagtcatttgttaatatttcttcgtgatgacatatcacatgtcagccactgtgatagaggctgaggaatccaagaaaatggccagtgagatcaatgtgacggcagggaaatgtatgtgtgtctattttgtaactgtaaagatgaatgtcagttgttatttattgaaatgatttcacagtgtgtggtcaacatttctcatgttgaagctttaagaactaaaatgttctaaatatcccttggacattttatgtctttcttgtaaggcatactgccttgtttaatgttaattatgcagtgtttccctctgtgttagagcagagaggtttcgatatttattgatgttttcacaaagaacaggaaaataaaatatttaaaaatataaaaaaaaaaaaaaaaaaaaaaaaaaaaaaaaa

SEQ ID NO: 227 - DNA, 2383 bp, Artificial Sequence
  PITX1
cctggcgcagggactgctggaacctggctgtgcgcgctgtcgctttaagacagactctgccggcgccgtccggagccttagaaaccggccccggatcgcgagccggagccggagccggagccggggccggccgggctgctgaggcccgagcggcaggagcgcagcgcggagcgctgagccaggcgcccagtcgcgagaagctgccgccgcctctgcccgcccggcgccgcagccccgggcggtccatggggcgggcacggcgtcgctgcaggcgccggcagccctggagggcagccgcttaggcgctgcgctcttgtccccgcaggtcgcagccagggcggcggggcgcgcccagccccggcccctggagcgcccgccgcggtccccacctccatggacgccttcaaggggggcatgagcctggagcggctgccggaggggctccggccgccgccgccgccaccccatgacatggggcccgccttccacctggcccggcccgccgacccccgcgagccgctcgagaactccgccagcgagtcgtctgacacggagctgccagagaaggagcgcggcggggaacccaaggggcccgaggacagtggtgcgggaggcacgggctgcggcggcgcagacgacccagccaagaagaagaagcagcggcggcaacgtacgcacttcacaagccagcagttgcaagagctagaggccacgttccagaggaaccgctaccccgacatgagcatgagggaggagatcgccgtgtggaccaacctcaccgagccgcgcgtgcgggtctggttcaagaaccggcgagccaagtggcgtaagcgcgagcgtaaccagcagctggacctgtgcaagggtggctacgtgccgcagttcagcggcctagtgcagccctacgaggacgtgtacgccgccggctactcctacaacaactgggccgccaagagcctggcgccagcgccgctctccaccaagagcttcaccttcttcaactccatgagcccgctgtcgtcgcagtccatgttctcagcacccagctccatctcctccatgaccatgccgtccagcatgggcccaggcgccgtgcctggcatgcccaactcgggcctcaacaacatcaacaacctcaccggctcctcgctcaactcggccatgtcgccgggcgcttgcccgtacggcactcccgcctcgccctacagcgtctaccgggacacgtgcaactcgagcctagccagcctgcggctcaagtccaaacagcactcgtcgtttggctacggcggcctgcagggcccggcctcgggcctcaacgcgtgccagtacaacagctgaccgccccgccgcaccacgcgggccggcggccggagcggggaagggcgcgggcgcgggcgcggaggacgcacgcggggccccggctcgcaagccccagctcaccgcgccgcggacctcacacctgcgcagccccctcctcccacttcccactccgggttggttttgtgtttgcttttccggaccccactctgccctccaaaaagacaaaaaaaaaaaaaaaaaaaaaaaagcaaaaagacgtcggagaaaagtgccgcgaaaaaatggatgagttgcaatttctctcgggatggcgcgggtggtgtgtgtgttcccacgggccccggaggcccactccgcggagggcacgcggcgcggtaggcgagcgccgaggcccagcggccgggggaggacgacctcgtatcccgcgtccccgccgcgctggatccggactgagtggccgggcctgcggactggatgtgcggggcctggacttgcctaggatttcccgaccccgtacaaaccaagttgccctctccgagctaggcccggccgagagcgccttagctcgagtcggatccgtgttggggcgggcgttgggtttggggggacggtgcccccagcccaggatcgggcactcagtggagccgcacacggccccggcgcgcctggtagagcctcgctggccccgcgccccggagccctatattaaggccacggagcgacagcgggcagtgcgggcctggcgggaggtgggggaggtccatctcagaacaccccagccttgagcttagctgcaggcccaggccctctgctctgctcccgggctaggaggtggccctctgtctgggcgaacagccccctcctcaccgcccgccgtgcaagagtcgagccggcagagcaaggggcgcggccccagggccctgcgcccactttgcacacccgctctccggcccgcgcccctgtttacagcgtccctgtgtatgttggactgactgtaataaatctgtctatatcgacttgtccatgtacgtctattaaaaccatagtccgagcgtgctaagca

SEQ ID NO: 228 - DNA, 5650 bp, Artificial Sequence
  ADGRB3
gttggatacggcgcaaggttctgggctcctgctggcttttttttcctctctctcatcgacccccctttggttcccaccccccaccttttgcttttcgtatgtatgcatttttaaaaataaatcctgattttggaagctgagccggggaaaatgggcaacggtgattgggaccgaaggggagtctctccgtcactgttgctgggacgcgtgcctgtgctggtgtcttagagcaagagcctccctgagctttcggagtggaagaacagtggaagagactgcagcctaaagacttttaaaattaacttggcatcacttttatcagctcaaaggctaaacaaacaaacaaaagcagtgtcatttattctaagaaataacttcttaaaggttaaagctgaaaaatattcaagttatttttggataacaacttacagaggccaaatgacataggatgaaggctgttcgtaacctgctgatttatatattttccacctatctcctggttatgtttggatttaatgctgcccaagacttctggtgttcaactttggtgaagggagtcatttatggatcgtattctgtaagtgaaatgtttcctaaaaactttacaaactgcacttggacgctggaaaatccagatccaaccaaatatagcatttacctgaaattttccaaaaaggaccttagctgctctaacttttcactcctggcttatcagtttgatcatttttcccatgaaaaaataaaggatcttttaagaaagaatcattctataatgcaactctgcaattccaagaatgctttcgtttttctacagtatgataaaaattttattcaaatacgtcgagtatttccaactaatttcccaggattacagaaaaaaggggaagaagatcagaaatctttttttgagtttttggtattgaacaaggtcagcccaagccagtttggttgccatgtattatgtacttggttggagagctgcttaaaatcagaaaatgggagaacagaatcatgtgggatcatgtatacaaaatgcacctgccctcagcatttgggagagtgggggatcgacgaccagtcgctgattttgttaaataacgtggtgttacccctgaatgagcagacagagggctgcctgacccaggagctgcaaaccacccaagtctgcaatcttaccagggaggccaagcgaccacccaaagaagaatttggaatgatgggagatcatacaattaaaagtcagcgacctcgatctgttcatgaaaaaagggtccctcaggaacaagctgatgctgctaaatttatggcacaaactggtgaatctggtgtggaagagtggtcccagtggagcacatgttcggttacttgtggtcaagggtcgcaggtgcgaaccagaacttgtgtatcaccttacgggacacactgcagcggcccattaagagaatcaagggtttgcaataacactgccctctgtccagtacacggagtatgggaggaatggtcaccatggagtttatgttcatttacatgtggtcgaggccaaagaacaagaacaaggtcatgcacacctcctcagtatggaggaaggccgtgtgaaggacctgaaacacatcataagccttgtaatattgctctttgcccagttgatggacagtggcaagagtggagttcgtggagccagtgctcagtaacgtgctcgaatgggactcagcagagaagccggcagtgcactgcagctgcccatggaggctccgaatgcagagggccatgggcagaaagcagagagtgctataaccctgaatgtacagccaatggtcaatggaatcagtggggtcattggagtggttgttccaagtcctgtgatggcggctgggaaaggcgaataaggacctgtcagggtgcagtgataacagggcagcaatgtgaaggaacgggcgaagaagtgagaagatgcagtgagcagcgatgccctgcaccttatgaaatatgccctgaggattatctgatgtcgatggtgtggaaaagaactccagcaggcgacttggcattcaatcaatgtcccctgaatgccacaggcaccactagcagacgctgctctctcagtcttcatggagtggccttctgggaacagccgagctttgcaagatgcatatcaaatgagtacagacacttgcagcattcaattaaagagcaccttgctaaggggcagcgaatgctggcaggtgatggaatgtcccaggtgaccaagacactgttggatttaactcagagaaaaaatttctatgcaggcgatcttctgatgtctgtggagatcctgagaaatgtgacagacacatttaaaagggcaagttacatccctgcatctgatggtgtccagaacttctttcaaatagttagcaaccttctagatgaagaaaacaaggaaaaatgggaagatgcacaacagatttatccagggtcaatagagttaatgcaggtgattgaagattttatacacattgttggaatggggatgatggactttcagaattcatacttaatgactggaaatgtagtggctagtattcagaagcttcctgcagcctctgttctaacagacatcaactttccaatgaaaggacggaagggaatggttgactgggcaagaaactcagaagatagggtagtaattccaaaaagcattttcactccggtgtcatcaaaagaattagatgaatcatctgtatttgttcttggcgcagtcctatacaaaaacttagatctaattttgcccactttgagaaattatactgtcattaattccaaaatcatcgtggtcacaataaggcctgaacccaaaacaaccgattcgtttctggagatagaactagctcatttggctaatggtactttgaatccctattgtgtattgtgggatgactccaaaacgaacgagtctttgggaacgtggtccacccagggatgtaaaactgtgcttaccgatgcatcccatacgaaatgcttatgtgatcgtctctctaccttcgccattttggctcagcaacctagagaaataatcatggaatcctctggcacaccttcagttaccctaatagtaggcagtggtctttcttgcttggccttgattaccctagcagttgtctatgcagcattatggaggtacatacgctctgagagatccataatactaattaacttctgcctgtctatcatctcatccaatatcctcatactggttggacagactcagacacataataagagtatctgcacaaccaccactgcatttttgcactttttcttcctggcttcattctgttgggttttgactgaggcgtggcaatcatatatggctgtaactggaaaaattaggacacggcttataagaaaacgctttttgtgccttggatggggtttaccagcattagtagtggccacatcagtaggcttcaccagaacaaaaggatatggcactgatcactactgctggctctctcttgaaggaggactactctatgcttttgtgggacctgcagccgctgttgtcctggtcaacatggtgattggcattttggtatttaataaacttgtttccagagatggaatcctagataaaaagctcaaacacagagccggtcagatgagtgagcctcatagcggtttgacgctcaaatgtgccaagtgtggagtagtttcaacaacagctttgtcagccaccaccgccagtaacgccatggcgtctctttggagctcctgtgtggtgttgccccttctggctttgacgtggatgtctgcggttctggccatgacagataaacgctccatattgtttcaaatactttttgctgtgtttgattcattgcaaggctttgttatagtcatggtccactgcattcttcggagagaggttcaggatgcatttagatgccgattgagaaactgtcaggatcccatcaatgcagattcttcgagttcgtttcctaatgggcatgctcaaatcatgacagactttgaaaaggatgtagacattgcctgtcgatcagttcttcataaggatattggtccttgccgagcagccacaataacaggaacactttctaggatttctctaaatgatgatgaagaagaaaagggaacaaaccctgaagggctaagctattcaacattgcctggaaatgtcatttccaaagtcatcatccagcaacccacaggtttgcacatgcccatgagtatgaatgagcttagcaatccatgtttgaaaaaagaaaatagtgaattgcggagaactgtgtacttatgtacggatgataatttgagaggggctgacatggacatagtccatcctcaagaaagaatgatggaaagtgactatattgtgatgcccagaagttctgtaaataaccagccttcaatgaaagaagaaagcaaaatgaatattggcatggaaaccttgccgcatgaaaggctattgcactacaaagtaaaccctgaattcaatatgaatccccctgtaatggaccagttcaatatgaacttagagcaacatctcgcaccccaggaacatatgcagaatttgccctttgaacctcgcacagctgtgaagaatttcatggcctctgagttggatgataatgcaggactatcaagaagtgaaactggatcaacgatatcaatgagttctttagagagaagaaaatcacgatattcagaccttgactttgagaaggtcatgcatacaaggaagaggcatatggaactatttcaagaactaaatcagaaatttcaaactttggacagatttcgggatataccaaatacaagcagtatggaaaaccccgcaccaaacaagaatccatgggacactttcaaaaaccccagtgaatacccgcattacaccacaatcaatgtcttagacacagaggcaaaggatgctttggaactgaggccagcagagtgggagaagtgtctgaatttgcctctggatgtgcaagagggtgactttcaaacagaagtttaaaaaaatcaaaatggactaaggtagagacaaaactttattgcactgacacttaagacttgggaagcctgacatttctatctggacagtgtgactatcttatgtcaggaccttcatgtgccaaacgtcagtggtgttttcatatggtaacttctcactagtcaggctagtggagagatgaccaggtgtacagttctgaccatcctgtgttgtaagtacccgtggaatggatttgtaaggtaatctttatagataaacctcaagcaacgattcatgttgtaaccgcttcatatggtttagttttcaaaaaacttcaccatgaagcacaatgtatatatttatgcagtttttaaagtttataacagtctgtttggccattactacactttttactttataatataaaagcaaagtttttgtcattaaatgaatgtttgttgagctacattcttcattgctttaaatgcaataaagtaataatctcacttttatatgaataatatatttcacatctttattattgcagttttctctagaaagctctgagaagctttctctgctgcagctgtgtataaaatatttaaaatgttgtatggtgtaaataaacttttgtctacatatcaaaaaaaaaaaaaa

SEQ ID NO: 229 - DNA, 1188 bp, Artificial Sequence
  TAC1
cacgcaagcgaaaggagaggaggcggctaattaaatattgagcagaaagtcgcgtggggagaatgtcacgtgggtctggaggctcaaggaggctgggataaataccgcaaggcactgagcaggcgaaagagcgcgctcggacctccttcccggcggcagctaccgagagtgcggagcgaccagcgtgcgctcggaggaaccagagaaactcagcaccccgcgggactgtccgtcgcaaaatccaacatgaaaatcctcgtggccttggcagtcttttttcttgtctccactcagctgtttgcagaagaaataggagccaatgatgatctgaattactggtccgactggtacgacagcgaccagatcaaggaggaactgccggagccctttgagcatcttctgcagagaatcgcccggagacccaagcctcagcagttctttggattaatgggcaaacgggatgctgattcctcaattgaaaaacaagtggccctgttaaaggctctttatggacatggccagatctctcacaaaagacataaaacagattcctttgttggactaatgggcaaaagagctttaaattctgtggcttatgaaaggagtgcaatgcagaattatgaaagaagacgttaataaactacctaacattatttattcagcttcatttgtgtcaatgggcaatgacaggtaaattaagacatgcactatgaggaataattatttatttaataacaattgtttggggttgaaaattcaaaaagtgtttatttttcatattgtgccaatatgtattgtaaacatgtgttttaattccaatatgatgactcccttaaaatagaaataagtggttatttctcaacaaagcacagtgttaaatgaaattgtaaaacctgtcaatgatacagtccctaaagaaaaaaaatcattgctttgaagcagttgtgtcagctactgcggaaaaggaaggaaactcctgacagtcttgtgcttttcctatttgttttcatggtgaaaatgtactgagattttggtattacactgtatttgtatctctgaagcatgtttcatgttttgtgactatatagagatgtttttaaaagtttcaatgtgattctaatgtcttcatttcattgtatgatgtgttgtgatagctaacattttaaataaaagaaaaaatatcttgaa

SEQ ID NO: 230 - DNA, 2080 bp, Artificial Sequence
  TACSTD2
gcgggtccccagaagcctacaggtgagtatcggttctccccttcccggctttcggtccggaggaggcgggagcagcttccctgttctgatcctatcgcgggcggcgcagggccggcttggccttccgtgggacggggaggggggcgggatgtgtcacccaaataccagtggggacggtcggtggtggaaccagccgggcaggtcgggtagagtataagagccggagggagcggccgggcggcagacgcctgcagaccatcccagacgccggagcccgagccccgacgagtccccgcgcctcatccgcccgcgtccggtccgcgttcctccgccccaccatggctcggggccccggcctcgcgccgccaccgctgcggctgccgctgctgctgctggtgctggcggcggtgaccggccacacggccgcgcaggacaactgcacgtgtcccaccaacaagatgaccgtgtgcagccccgacggccccggcggccgctgccagtgccgcgcgctgggctcgggcatggcggtcgactgctccacgctgacctccaagtgtctgctgctcaaggcgcgcatgagcgcccccaagaacgcccgcacgctggtgcggccgagtgagcacgcgctcgtggacaacgatggcctctacgaccccgactgcgaccccgagggccgcttcaaggcgcgccagtgcaaccagacgtcggtgtgctggtgcgtgaactcggtgggcgtgcgccgcacggacaagggcgacctgagcctacgctgcgatgagctggtgcgcacccaccacatcctcattgacctgcgccaccgccccaccgccggcgccttcaaccactcagacctggacgccgagctgaggcggctcttccgcgagcgctatcggctgcaccccaagttcgtggcggccgtgcactacgagcagcccaccatccagatcgagctgcggcagaacacgtctcagaaggccgccggtgacgtggatatcggcgatgccgcctactacttcgagagggacatcaagggcgagtctctattccagggccgcggcggcctggacttgcgcgtgcgcggagaacccctgcaggtggagcgcacgctcatctattacctggacgagattcccccgaagttctccatgaagcgcctcaccgccggcctcatcgccgtcatcgtggtggtcgtggtggccctcgtcgccggcatggccgtcctggtgatcaccaaccggagaaagtcggggaagtacaagaaggtggagatcaaggaactgggggagttgagaaaggaaccgagcttgtaggtacccggcggggcaggggatggggtggggtaccggatttcggtatcgtcccagacccaagtgagtcacgcttcctgattcctcggcgcaaaggagacgtttatcctttcaaattcctgccttccccctcccttttgcgcacacaccaggtttaatagatcctggcctcagggtctcctttctttctcacttctgtcttgaaggaagcatttctaaaatgtatcccctttcggtccaacaacaggaaacctgactggggcagtgaaggaagggatggcatagcgttatgtgtaaaaaacaagtatctgtatgacaacccgggatcgtttgcaagtaactgaatccattgcgacattgtgaaggcttaaatgagtttagatgggaaatagcgttgttatcgccttgggtttaaattatttgatgagttccacttgtatcatggcctacccgaggagaagaggagtttgttaactgggcctatgtagtagcctcatttaccatcgtttgtattactgaccacatatgcttgtcactgggaaagaagcctgtttcagctgcctgaacgcagtttggatgtctttgaggacagacattgcccggaaactcagtctatttattcttcagcttgcccttactgccactgatattggtaatgttcttttttgtaaaatgtttgtacatatgttgtctttgataatgttgctgtaattttttaaaataaaacacgaatttaataaaatatgggaaaggcacaaaccagaaaaaaaaaa

SEQ ID NO: 231 - DNA, 4296 bp, Artificial Sequence
  PPP1R3A
agttctctcttatttgatatcagagagcccaatggagccttctgaagtacctagtcagattagcaaagataattttttagaagttcctaatttatctgactctctttgtgaagatgaagaagttactttccaacctggtttctcccctcaaccaagtagacgaggttctgattcttctgaagacatatacctggataccccatcttcaggtactagaagagtttcatttgctgattcctttggattcaatcttgtgtctgttaaagaatttgattgctgggaattaccgagtgcttcaaccacttttgacttagggacggacattttccacacagaagaatatgttttagccccactgtttgacttgccttcttcaaaagaagatcttatgcaacaactccaaatacagaaagcaatactggagtcaactgagtctcttcttgggtctacaagtatcaagggtattattcgagttttgaatgtttcttttgagaagttagtatatgtaagaatgtctttagatgactggcagacacattatgacattttagcagaatatgttcctaattcatgtgatggtgaaactgaccagttctcctttaagattgtattggttcctccttatcaaaaagatggcagtaaagttgagttttgtatacgttatgaaacttctgttggtacattttggtcaaataataatggcacaaattatacattcatttgtcaaaagaaagaacaagagccggagcctgtaaaaccatggaaagaagttcctaacagacaaataaaaggctgcttaaaggtaaaatcaagtaaagaagaatcatcagtaacatcagaagaaaataactttgagaatccaaagaatacagatacctatatcccaacaatcatttgttctcatgaggacaaggaagatttggaagccagtaatcgaaatgtaaaagatgtaaacagggaacatgatgaacataatgaaaaagaattagagttgatgataaatcaacacttaataagaaccagaagtactgcttccagagatgaaaggaatacattttcaacagatccagtcaattttccaaataaagcagaggggttagagaagaagcaaatccatggtgaaatatgtactgacttgttccaaaggtctctgtctccaagttcatcagcagaaagctccgtaaagggagatttttactgcaatgaaaaatattcctcaggagatgactgtacacatcaaccttcagaggaaactacttcaaatatgggagaaatcaagccatcattgggagatactagtagtgatgaactagtgcaattacatactggcagcaaagaagtcctggatgataatgctaatccagcccatggcaatggcacagtgcaaataccttgcccctcttcagatcaactaatggcaggaaaccttaataaaaaacatgaaggaggagctaaaaatattgaagtaaaagatttgggatgtttacgaagagatttccattcagatacgtcggcatgtctcaaagaatcaacagaagaaggatcttctaaggaagattattatggcaatggtaaggatgatgaagaacaaagaatatatttaggtgttaatgaaaaacaaagaaaaaatttccaaacaatcttacatgaccaagaaaggaagatgggtaaccctaaaataagtgtggcagggattggagctagtaacagagacctggctactctgctgagcgaacataccgcaatccccacccgggcaatcacagcagatgtgtctcattcaccaaggacaaatttaagttgggaagaagctgtgttaaccccagagcatcatcatttgactagtgaaggcagcgctttaggagggataactggtcaagtttgttcatcaagaactggaaatgttttgaggaatgattatcttttccaagttgaagaaaaatcaggtgggattaattctgaagatcaggataatagcccacagcataaacaaagttggaatgttctggaaagtcagggaaaatcaagagagaataagacaaacataacagagcatatcaaaggacaaacagattgtgaagacgtgtggggaaaaagagataatacgaggagtttgaaagctactacagaagaattgtttacctgccaagaaacagtgtgctgtgaactgtcttctctagctgatcatggcattactgagaaagcagaagctggtacagcctatataattaagacaacatcagaaagtactccagaaagcatgtctgctagagaaaaagcaataattgctaagctacctcaagagacagcacgaagtgacaggcccatcgaggtaaaggaaacagcgtttgatccacatgaagggagaaatgatgattcacattataccctttgtcaacgagatacagtaggtgtaatctatgacaatgattttgaaaaggaatcacgtttaggtatttgtaatgtacgtgtagatgaaatggagaaggaagaaaccatgtctatgtacaatcctaggaagacacatgacagggagaaatgtggcactggaaatataacatctgtggaagaatcctcatgggtcattacagaatatcaaaaagcaacttcaaaactggatttacagttgggaatgttaccaacagacaaaactgtattttcagaaaacagagatcttaggcaggttcaagaattatcaaagaaaacagactcggatgccattgtgcattctgcttttaactcagacactaatagagctcctcagaatagctctcctttttccaaacatcatactgaaatttcagtgtcaactaatgagcaggcaattgctgtagagaatgcagttactaccatggctagccaacctatttctacgaaatcagaaaatatttgtaattcaacaagagaaatccagggtattgagaagcacccttatcctgagtctaaacctgaagaagtttccagaagttcaggaatagtgacatcaggtagtagaaaagaaagatgcataggccagattttccaaacagaagagtatagtgtggaaaaatctctagggccaatgattttaatcaacaaacctcttgagaatatggaagaagcaaggcatgaaaatgaaggattagtaagctctgggcaatcactatacacttcaggtgaaaaggaatctgacagctctgcttctactagtcttcctgttgaggaaagtcaagctcaaggcaacgaatctttgttttcaaaatataccaactctaaaataccttatttccttttgtttctgatatttcttataactgtctaccattatgacttaatgattggcttgacattctacgttttgtcattgtcctggctatcctgggaagagggtagacaaaaagagtctgtcaaaaagaagtaacctcagcactactattctctcttaaaagataagctatttaaccccaaacatttggattggtgaatgggactattcattgttcaaagatccagtgcagtttttctcttgaaggatcatttaaaaagggacgcgaataagtttgctccttcatataagtaattattctatataggaccattatgtttggatcattaaatacctatatgaatatgagatctgaagcacgtcaagttgaaattaggtacagctgttgctccttagcaggctatgaagttgcaatgcttcacatctcttcactacttaaagtgctatttcttgcattcatttctcttgcaataaagcttcatttttttttccccttgagagtatatattttcccctacggttttaaaaaacagataaaacatggacaatggcagaggacttttttggtcttttagtattgaacatgaaatttgttcaatttatcatttatcaggattcattgatcaaatatttcaacctttcatatttttaagaaaacacccatatatattgaaatgcaaacttaaacatattctgttcacttgagtgtaatacttgatgcatgcacacacacacacacataccttctttatagctacaaagtcagggcgttcataggcaaaatctgacaagactgaaacaattgggagattatctttcaattctgaaaaattctgtgggtggcctgtctttaagcaatgcttttctcttgtgagggaagactgtaacacagctgaactatttcagtgtcaactattcagaattgaaaatgtaaattaaaatttccacaagcattgcttcagaatgaatttgtacctataaagcataaggcattaaatgacaataaaaattccaaatggactatttgttcc

SEQ ID NO: 232 - DNA, 1955 bp, Artificial Sequence
  PTX3
attcatccccattcaggctttcctcagcatttattaaggactctctgctccagcctctcactctcactctcctccgctcaaactcagctcacttgagagtctcctcccgccagctgtggaaagaactttgcgtctctccagcaatgcatctccttgcgattctgttttgtgctctctggtctgcagtgttggccgagaactcggatgattatgatctcatgtatgtgaatttggacaacgaaatagacaatggactccatcccactgaggaccccacgccgtgcgcctgcggtcaggagcactcggaatgggacaagctcttcatcatgctggagaactcgcagatgagagagcgcatgctgctgcaagccacggacgacgtcctgcggggcgagctgcagaggctgcgggaggagctgggccggctcgcggaaagcctggcgaggccgtgcgcgccgggggctcccgcagaggccaggctgaccagtgctctggacgagctgctgcaggcgacccgcgacgcgggccgcaggctggcgcgtatggagggcgcggaggcgcagcgcccagaggaggcggggcgcgccctggccgcggtgctagaggagctgcggcagacgcgagccgacctgcacgcggtgcagggctgggctgcccggagctggctgccggcaggttgtgaaacagctattttattcccaatgcgttccaagaagatttttggaagcgtgcatccagtgagaccaatgaggcttgagtcttttagtgcctgcatttgggtcaaagccacagatgtattaaacaaaaccatcctgttttcctatggcacaaagaggaatccatatgaaatccagctgtatctcagctaccaatccatagtgtttgtggtgggtggagaggagaacaaactggttgctgaagccatggtttccctgggaaggtggacccacctgtgcggcacctggaattcagaggaagggctcacatccttgtgggtaaatggtgaactggcggctaccactgttgagatggccacaggtcacattgttcctgagggaggaatcctgcagattggccaagaaaagaatggctgctgtgtgggtggtggctttgatgaaacattagccttctctgggagactcacaggcttcaatatctgggatagtgttcttagcaatgaagagataagagagaccggaggagcagagtcttgtcacatccgggggaatattgttgggtggggagtcacagagatccagccacatggaggagctcagtatgtttcataaatgttgtgaaactccacttgaagccaaagaaagaaactcacacttaaaacacatgccagttgggaaggtctgaaaactcagtgcataataggaacacttgagactaatgaaagagagagttgagaccaatctttatttgtactggccaaatactgaataaacagttgaaggaaagacattggaaaaagcttttgaggataatgttactagactttatgccatggtgctttcagtttaatgctgtgtctctgtcagataaactctcaaataattaaaaaggactgtattgttgaacagagggacaattgttttacttttctttggttaattttgttttggccagagatgaattttacattggaagaataacaaaataagatttgttgtccattgttcattgttattggtatgtaccttattacaaaaaaaagatgaaaacatatttatactacaaggtgacttaacaactataaatgtagtttatgtgttataatcgaatgtcacgtttttgagaagatagtcatataagttatattgcaaaagggatttgtattaatttaagactatttttgtaaagctctactgtaaataaaatattttataaaactagctcacgtcatttaattataaatttaagagatgttttggaaaaaaaaaaaaaaaaaa

SEQ ID NO: 233 - DNA, 838 bp, Artificial Sequence
  FABP4
gggtcacagcaccctcctgaaaactgcagcttccttctcaccttgaagaataatcctagaaaactcacaaaatgtgtgatgcttttgtaggtacctggaaacttgtctccagtgaaaactttgatgattatatgaaagaagtaggagtgggctttgccaccaggaaagtggctggcatggccaaacctaacatgatcatcagtgtgaatggggatgtgatcaccattaaatctgaaagtacctttaaaaatactgagatttccttcatactgggccaggaatttgacgaagtcactgcagatgacaggaaagtcaagagcaccataaccttagatgggggtgtcctggtacatgtgcagaaatgggatggaaaatcaaccaccataaagagaaaacgagaggatgataaactggtggtggaatgcgtcatgaaaggcgtcacttccacgagagtttatgagagagcataagccaagggacgttgacctggactgaagttcgcattgaactctacaacattctgtgggatatattgttcaaaaagatattgttgttttccatgatttagcaagcaactaattttctcccaagctgattttattcaatatggttacgttggttaaataaactttttttagatttagaaggtgatgtaatgatgtattcattgtgcttatgatgtattcttagtcataactgagtgaaggaaatgggaaatttgcattatttctttgttctgatatgaataataacatatttcataataattcaaggtaaaaagggatatctatggatttccctaggtaggagataacaagtatgtaccattactgaatat

SEQ ID NO: 234 - DNA, 2974 bp, Artificial Sequence
  SFRP4
gcggccgagggggagcccgcgccgcggctgcagctgccaagggagcgttccgagcccacgtcaggggaggtgtcgggataaatagggtcccgcaatggccgtggctggctgcgctccgagctgcggagtccgggactggagctgcccgggcgggttcgcgccccgaaggctgagagctggcgctgctcgtgccctgtgtgccagacggcggagctccgcggccggaccccgcggccccgctttgctgccgactggagtttgggggaagaaactctcctgcgccccagaggatttcttcctcggcgaagggacagcgaaagatgagggtggcaggaagagaagggcgctttctgtctgccggggtcgcagcgcgagagggcagtgccatgttcctctccatcctagtggcgctgtgcctgtggctgcacctggcgctgggcgtgcgcggcgcgccctgcgaggcggtgcgcatccctatgtgccggcacatgccctggaacatcacgcggatgcccaaccacctgcaccacagcacgcaggagaacgccatcctggccatcgagcagtacgaggagctggtggacgtgaactgcagcgccgtgctgcgcttcttcctctgtgccatgtacgcgcccatttgcaccctggagttcctgcacgaccctatcaagccgtgcaagtcggtgtgccaacgcgcgcgcgacgactgcgagcccctcatgaagatgtacaaccacagctggcccgaaagcctggcctgcgacgagctgcctgtctatgaccgtggcgtgtgcatctcgcctgaagccatcgtcacggacctcccggaggatgttaagtggatagacatcacaccagacatgatggtacaggaaaggcctcttgatgttgactgtaaacgcctaagccccgatcggtgcaagtgtaaaaaggtgaagccaactttggcaacgtatctcagcaaaaactacagctatgttattcatgccaaaataaaagctgtgcagaggagtggctgcaatgaggtcacaacggtggtggatgtaaaagagatcttcaagtcctcatcacccatccctcgaactcaagtcccgctcattacaaattcttcttgccagtgtccacacatcctgccccatcaagatgttctcatcatgtgttacgagtggcgctcaaggatgatgcttcttgaaaattgcttagttgaaaaatggagagatcagcttagtaaaagatccatacagtgggaagagaggctgcaggaacagcggagaacagttcaggacaagaagaaaacagccgggcgcaccagtcgtagtaatccccccaaaccaaagggaaagcctcctgctcccaaaccagccagtcccaagaagaacattaaaactaggagtgcccagaagagaacaaacccgaaaagagtgtgagctaactagtttccaaagcggagacttccgacttccttacaggatgaggctgggcattgcctgggacagcctatgtaaggccatgtgccccttgccctaacaactcactgcagtgctcttcatagacacatcttgcagcatttttcttaaggctatgcttcagtttttctttgtaagccatcacaagccatagtggtaggtttgccctttggtacagaaggtgagttaaagctggtggaaaaggcttattgcattgcattcagagtaacctgtgtgcatactctagaagagtagggaaaataatgcttgttacaattcgacctaatatgtgcattgtaaaataaatgccatatttcaaacaaaacacgtaatttttttacagtatgttttattaccttttgatatctgttgttgcaatgttagtgatgttttaaaatgtgatcgaaaatataatgcttctaagaaggaacagtagtggaatgaatgtctaaaagatctttatgtgtttatggtctgcagaaggatttttgtgatgaaaggggattttttgaaaaatctagagaagtagcatatggaaaactataatgtgtcttttttacaatgacttcagctctgtttttagctagaaactctaaaaacaaaaataataataaagaaaaataaataaaaaggagaggcagacaatgtctggattcctgttttttggttacctgatttcatgatcatgatgcttcttgtcaacaccctcttaagcagcaccagaaacagtgagtttgtctgtaccattaggagttaggtactaattagttggctaatgctcaagtattttatacccacaagagaggtatgtcactcatcttacttcccaggacatccaccctgagaataatttgacaagcttaaaaatggccttcatgtgagtgccaaattttgttttcttcatttaaatattttctttgcctaaatacatgtgagaggagttaaatataaatgtacagagaggaaagttgaggttccacctctgaaatgagaattacttgacagttgggatactttaatcagaaaaaaagaacttatcttgcagcattttatcaacaaatttcataattgtggacaattggaggcatttattttaaaaaacaattttattggccttttgctaacacagtaagcatgtattctctataaggcattcaataaatgcacaacgcccaaaggaaataaaatcctatctaatcctactctccactacacagaggtaatcactattagtattttggcatattattctccaggtgtttcttatgcacttataaaatgatttgaacaaataaaactaggaacctgctatacatgtgtttcataacctgcctcctttgcttggccctttattgagataagttttcctgtcaagaaagcagaaaccatctcatttctaacagctgtgttatattccatagtatgcattactcaacaaactgttgtgctattggatacttaggtggtttcttcactgacaatactgaataaacatctcaatagtcaaa

SEQ ID NO: 235 - DNA, 2692 bp, Artificial Sequence
  PCK1
tttaaagctgggaggttctgccaccaagcacggccttcccactgggaacacaaacttgctggcgggaagagcccggaaagaaacctgtggatctcccttcgagatcatccaaagagaagaaaggtgacctcacattcgtgccccttagcagcactctgcagaaatgcctcctcagctgcaaaacggcctgaacctctcggccaaagttgtccagggaagcctggacagcctaccccaggcagtgagggagtttctcgagaataacgctgagctgtgtcagcctgatcacatccacatctgtgacggctctgaggaggagaatgggcggcttctgggccagatggaggaagagggcatcctcaggcggctgaagaagtatgacaactgctggttggctctcactgaccccagggatgtggccaggatcgaaagcaagacggttatcgtcacccaagagcaaagagacacagtgcccatccccaaaacaggcctcagccagctcggtcgctggatgtcagaggaggattttgagaaagcgttcaatgccaggttcccagggtgcatgaaaggtcgcaccatgtacgtcatcccattcagcatggggccgctgggctcgcctctgtcaaagatcggcatcgagctgacggattcaccctacgtggtggccagcatgcggatcatgacgcggatgggcacgcccgtcctggaagcagtgggcgatggggagtttgtcaaatgcctccattctgtggggtgccctctgcctttacaaaagcctttggtcaacaactggccctgcaacccggagctgacgctcatcgcccacctgcctgaccgcagagagatcatctcctttggcagtgggtacggcgggaactcgctgctcgggaagaagtgctttgctctcaggatggccagccggctggccaaggaggaagggtggctggcagagcacatgctgattctgggtataaccaaccctgagggtgagaagaagtacctggcggccgcatttcccagcgcctgcgggaagaccaacctggccatgatgaaccccagcctccccgggtggaaggttgagtgcgtcggggatgacattgcctggatgaagtttgacgcacaaggtcatttaagggccatcaacccagaaaatggctttttcggtgtcgctcctgggacttcagtgaagaccaaccccaatgccatcaagaccatccagaagaacacaatctttaccaatgtggccgagaccagcgacgggggcgtttactgggaaggcattgatgagccgctagcttcaggtgtcaccatcacgtcctggaagaataaggagtggagctcagaggatggggaaccttgtgcccaccccaactcgaggttctgcacccctgccagccagtgccccatcattgatgctgcctgggagtctccggaaggtgttcccattgaaggcattatctttggaggccgtagacctgctggtgtccctctagtctatgaagctctcagctggcaacatggagtctttgtgggggcggccatgagatcagaggccacagcggctgcagaacataaaggcaaaatcatcatgcatgacccctttgccatgcggcccttctttggctacaacttcggcaaatacctggcccactggcttagcatggcccagcacccagcagccaaactgcccaagatcttccatgtcaactggttccggaaggacaaggaaggcaaattcctctggccaggctttggagagaactccagggtgctggagtggatgttcaaccggatcgatggaaaagccagcaccaagctcacgcccataggctacatccccaaggaggatgccctgaacctgaaaggcctggggcacatcaacatgatggagcttttcagcatctccaaggaattctgggagaaggaggtggaagacatcgagaagtatctggaggatcaagtcaatgccgacctcccctgtgaaatcgagagagagatccttgccttgaagcaaagaataagccagatgtaatcagggcctgagtgctttacctttaaaatcattccctttcccatccataaggtgcagtaggagcaagagagggcaagtgttcccaaattgacgccaccataataatcatcaccacaccgtgagcagatctgaaaggcacactttgatttttttaaggataagaaccacagaacactgggtagtagctaatgaaattgagaagggaaatcttagcatgcctccaaaaattcacatccaatgcatagtttgttcaaatttaaggttactcaggcattgatcttttcagtgttttttcactttagctatgtggattagctagaatgcacaccaaaaaaatacttgagctgtatatatatatgtgtgtgtgtgtgtgtgtgtgtgtgtgtgtgtgtgcatgtatgtgcacatgtgtctgtgtggtatatttgtgtatgtgtatttgtatgtactgttattgaaaatatatttaatacctttggaaaaatcttgggcaagatgacctactagttttccttgaaaaaaagttgctttgttattaatattgtgcttaaattatttttatacaccattgttccttacctttacataattgcaatatttcccccttactacttcttggaaaaaaattacaaaatgaagttttatagaaaagaaaaaaaa

SEQ ID NO: 236 - DNA, 1450 bp, Artificial Sequence
  AMBP
attgtgcttggccaatgcctcttctgaagcagccatcccggcctcttggtactgctgaccccagccaggctacagggatcgattggagctgtccttggggctgtaattggccccagctgagcagggcaaacactgaggtcaactacaagccacaggccccttccccagcctcagttcacagctgccctgttgcagggaggcggtggcccttctgttgctagaccgagcctgtgggatataccaaggcagaggagcccatagccatgaggagcctcggggccctgctcttgctgctgagcgcctgcctggcggtgagcgctggccctgtgccaacgccgcccgacaacatccaagtgcaggaaaacttcaatatctctcggatctatgggaagtggtacaacctggccatcggttccacctgcccctggctgaagaagatcatggacaggatgacagtgagcacgctggtgctgggagagggcgctacagaggcggagatcagcatgaccagcactcgttggcggaaaggtgtctgtgaggagacgtctggagcttatgagaaaacagatactgatgggaagtttctctatcacaaatccaaatggaacataaccatggagtcctatgtggtccacaccaactatgatgagtatgccattttcctgaccaagaaattcagccgccatcatggacccaccattactgccaagctctacgggcgggcgccgcagctgagggaaactctcctgcaggacttcagagtggttgcccagggtgtgggcatccctgaggactccatcttcaccatggctgaccgaggtgaatgtgtccctggggagcaggaaccagagcccatcttaatcccgagagtccggagggctgtgctaccccaagaagaggaaggatcagggggtgggcaactggtaactgaagtcaccaagaaagaagattcctgccagctgggctactcggccggtccctgcatgggaatgaccagcaggtatttctataatggtacatccatggcctgtgagactttccagtacggcggctgcatgggcaacggtaacaacttcgtcacagaaaaggagtgtctgcagacctgccgaactgtggcggcctgcaatctccccatagtccggggcccctgccgagccttcatccagctctgggcatttgatgctgtcaaggggaagtgcgtcctcttcccctacgggggctgccagggcaacgggaacaagttctactcagagaaggagtgcagagagtactgcggtgtccctggtgatggtgatgaggagctgctgcgcttctccaactgacaactggccggtctgcaagtcagaggatggccagtgtctgtcccggggtcctgtggcaggcagcgccaagcaacctgggtccaaataaaaactaaattgtaaactcctgaaaaaaaaaaaaaaaaaaa

SEQ ID NO: 237 - DNA, 4494 bp, Artificial Sequence
  SLC6A1
gcgaccctccgcccgccctcggaagaccgagacagcggagaggttgcgggtgagctgcgctgagcccaggagccgaggagtcgggagcgcagtagcgctgagcccgagcccgagcggccccgcgtcccgagcgcatcggagcggccgagccgcccggatgcagcgcctgtcccgggcagcgcagccccggccgcaggatctcacccagggtggcagaaggaggccttctggagctgacccacccccgacgaccatcagggtgaggcaactccaaggtcctactctctttctgtgcctgttacccaccccgtcctcctagggtgcccttgagccgcaaaactgctgtccacgtggaccgggggtgacatcgcacgtccatctgccaggacccctgcgtccaaattccgagacatggcgaccaacggcagcaaggtggccgacgggcagatctccaccgaggtcagcgaggcccctgtggccaatgacaagcccaaaaccttggtggtcaaggtgcagaagaaggcggcagacctccccgaccgggacacgtggaagggccgcttcgacttcctcatgtcctgtgtgggctatgccatcggcctgggcaacgtctggaggttcccctatctctgcgggaaaaatggtgggggagccttcctgatcccctatttcctgacactcatctttgcgggggtcccactcttcctgctggagtgctccctgggccagtacacctccatcggggggctaggggtatggaagctggctcctatgttcaagggcgtgggccttgcggctgctgtgctatcattctggctgaacatctactacatcgtcatcatctcctgggccatttactacctgtacaactccttcaccacgacactgccgtggaaacagtgcgacaacccctggaacacagaccgctgcttctccaactacagcatggtcaacactaccaacatgaccagcgctgtggtggagttctgggagcgcaacatgcatcagatgacggacgggctggataagccaggtcagatccgctggccactggccatcacgctggccatcgcctggatccttgtgtatttctgtatctggaagggtgttggctggactggaaaggtggtctacttttcagccacatacccctacatcatgctgatcatcctgttcttccgtggagtgacgctgcccggggccaaggagggcatcctcttctacatcacacccaacttccgcaagctgtctgactccgaggtgtggctggatgcggcaacccagatcttcttctcatacgggctgggcctggggtccctgatcgctctcgggagctacaactctttccacaacaatgtctacagggactccatcatcgtctgctgcatcaattcgtgcaccagcatgttcgcaggattcgtcatcttctccatcgtgggcttcatggcccatgtcaccaagaggtccattgctgatgtggcggcctcaggccccgggctggcgttcctggcatacccagaggcggtgacccagctgcctatctccccactctgggccatcctcttcttctccatgctgttgatgctgggcattgacagccagttctgcactgtggagggcttcatcacagccctggtggatgagtaccccaggctcctccgcaaccgcagagagctcttcattgctgctgtctgcatcatctcctacctgatcggtctctctaacatcactcaggggggtatttatgtcttcaaactctttgactactactctgccagtggcatgagcctgctgttcctcgtgttctttgaatgtgtctctatttcctggttttacggtgtcaaccgattctatgacaatatccaagagatggttggatccaggccctgcatctggtggaaactctgctggtctttcttcacaccaatcattgtggcgggcgtgttcattttcagtgctgtgcagatgacgccactcaccatgggaaactatgttttccccaagtggggccagggtgtgggctggctgatggctctgtcttccatggtcctcatccccgggtacatggcctacatgttcctcaccttaaagggctccctgaagcagcgcatccaagtcatggtccagcccagcgaagacatcgttcgcccagagaatggtcctgagcagccccaggcgggcagctccaccagcaaggaggcctacatctagggtgggggccactcaccgacccgacactctcaccccccgacctggctgagtgcgaccaccacttgatgtctgaggataccttccatctcaacctacctcgagtggcgagtccagacaccatcaccacgcagagaggggaggtgggaggacagttagacccctgggtgggccctgccgtgggcaaggatacccggtggcttctggcacctggcgggctggtgacctttttaatccaggccccatcagcatcccacgatcggccttggtaaccgccgcggtagatcatttttatcccgccagggagtgtgatgcaggaagaccacatgcgctcctggcttttaaacctgttcctgactgttctcttactgccgaaacccttgactgttatctcggactttgcaggagttcctttccctccgaacgctgctccatgcacaggaaaagggcattttgtacaatggggacttcccgggaacgcttgctcttaagtaccagaagccggcggagctctggctttcgtgtttttggttttctccttcccaaggcagctggattgaaaaaacaaaacaaaacaaaaaaacccaggggcgtcagtcgatattcccagggccgcttctcctgcagtctgtggagcgtccttgtccccgccgccggaatgaatgagcattctgcagcccgatgtccctgtcccctcctcgccgggccattctgattggacctggcccagtgcaatctgtccagacaagccctgcttgctggaaaactgccacaagcacaattgatctctttttatcgccattccaggggcctcaggtcctactggggaaacttcctataccggagctccagtttctcttaagctgcccaatttcacagagtacaaaatagttgtaggggaaatcaaggtgaaggatctgtccgacagtcaagacggatccacagtaatctttcggtctccttaaactaccaccctcgctgccacccaccccaagctgctgccgcctcaccttccttgaaatttctcagcgggagtctcctcactgccactaaaatccacccagcccactaactgaggagctagtgttaatccagagaaccccccgcaatgtgcttccgagattcagactgcttcattgggaagtatgatttgttcctttctggaattgggctccgtggtggcggcggcacttcaagcaaagacagtttcttgcaagctccagtagctccgcgtgtctcatttgccaggaagatgggttcccacgtagcaaatcgtacattgtgccctgtagctccttagctagttagctcacaagccgtgttttatgactaatccttaataactatggtaaataactgtgactgtggggtttttaatctcttgtcattctcatccaaaagtgaccagcataccagttcttgcaataagatattaccctcagaatattaagcacattattgtagagaaaaaaaaatatgtgtacacatatgaacgcacaacatgcacattcatcctcacatgtggcacgtaaggtctcatttgatattgtgtaggaaatctgaagccttttcctgaggtcatctgtaaaatagtctcattgccaaggcatccccagtgccagctggtgaatccatgatcaaaatgcatacgtattgttaaatgataaggtttagaatgacaggaacccatcactgtgtctcatggtcccacttccccatctgtgtgtgaattcctttagactaagggcaggaagacttccagctttctctttgttcttcaatgtgaaactgagaccaagtctctctaagacaaatgcagtgtatttaatgtttgtaagcaattctaagtgagatgtttggcaagaaatcccctaactgatttccatccaaacctaccttatagagcacaatattaagtgttgtacaattactgtgagaactgtgaatatgtgtaacttttttttagtatttgcccggggggaaaaagatattgtattatcatatatgcttttttgcaataaggatttattctcagaacaccaagtaaatctatctctatataaaaaatatatgtaatatatacatattcaaagtatatacagagcctgttttaaaaaatacagtattatttagtaaaattatctgttctatggaccaaatgtaaaatatttataaatgaagatgcattttaaatgtctataaatggtgtcataactagagcacgggcgttatgtaagtttctaagaatttagaggataaataataaaggttctatgatatacaaca

SEQ ID NO: 238 - DNA, 521 bp, Artificial Sequence
  SCGB2A1
cctccacagcaacttccttgatccctgccacgcacgactgaacacagacagcagccgcctcgccatgaagctgctgatggtcctcatgctggcggccctcctcctgcactgctatgcagattctggctgcaaactcctggaggacatggttgaaaagaccatcaattccgacatatctatacctgaatacaaagagcttcttcaagagttcatagacagtgatgccgctgcagaggctatggggaaattcaagcagtgtttcctcaaccagtcacatagaactctgaaaaactttggactgatgatgcatacagtgtacgacagcatttggtgtaatatgaagagtaattaactttacccaaggcgtttggctcagagggctacagactatggccagaactcatctgttgattgctagaaaccacttttctttcttgtgttgtctttttatgtggaaactgctagacaactgttgaaacctcaaattcatttccatttcaataaactaactgcaaatcact

SEQ ID NO: 239 - DNA, 8014 bp, Artificial Sequence
  PRKCB
agctggacgagcggcagcagctgggcgagtgacagccccggctccgcgcgccgcggccgccagagccggcgcaggggaagcgcccgcggccccgggtgcagcagcggccgccgcctcccgcgcctccccggcccgcagcccgcggtcccgcggccccggggccggcacctctcgggctccggctccccgcgcgcaagatggctgacccggctgcggggccgccgccgagcgagggcgaggagagcaccgtgcgcttcgcccgcaaaggcgccctccggcagaagaacgtgcatgaggtcaagaaccacaaattcaccgcccgcttcttcaagcagcccaccttctgcagccactgcaccgacttcatctggggcttcgggaagcagggattccagtgccaagtttgctgctttgtggtgcacaagcggtgccatgaatttgtcacattctcctgccctggcgctgacaagggtccagcctccgatgacccccgcagcaaacacaagtttaagatccacacgtactccagccccacgttttgtgaccactgtgggtcactgctgtatggactcatccaccaggggatgaaatgtgacacctgcatgatgaatgtgcacaagcgctgcgtgatgaatgttcccagcctgtgtggcacggaccacacggagcgccgcggccgcatctacatccaggcccacatcgacagggacgtcctcattgtcctcgtaagagatgctaaaaaccttgtacctatggaccccaatggcctgtcagatccctacgtaaaactgaaactgattcccgatcccaaaagtgagagcaaacagaagaccaaaaccatcaaatgctccctcaaccctgagtggaatgagacatttagatttcagctgaaagaatcggacaaagacagaagactgtcagtagagatttgggattgggatttgaccagcaggaatgacttcatgggatctttgtcctttgggatttctgaacttcagaaagccagtgttgatggctggtttaagttactgagccaggaggaaggcgagtacttcaatgtgcctgtgccaccagaaggaagtgaggccaatgaagaactgcggcagaaatttgagagggccaagatcagtcagggaaccaaggtcccggaagaaaagacgaccaacactgtctccaaatttgacaacaatggcaacagagaccggatgaaactgaccgattttaacttcctaatggtgctggggaaaggcagctttggcaaggtcatgctttcagaacgaaaaggcacagatgagctctatgctgtgaagatcctgaagaaggacgttgtgatccaagatgatgacgtggagtgcactatggtggagaagcgggtgttggccctgcctgggaagccgcccttcctgacccagctccactcctgcttccagaccatggaccgcctgtactttgtgatggagtacgtgaatgggggcgacctcatgtatcacatccagcaagtcggccggttcaaggagccccatgctgtattttacgctgcagaaattgccatcggtctgttcttcttacagagtaagggcatcatttaccgtgacctaaaacttgacaacgtgatgctcgattctgagggacacatcaagattgccgattttggcatgtgtaaggaaaacatctgggatggggtgacaaccaagacattctgtggcactccagactacatcgcccccgagataattgcttatcagccctatgggaagtccgtggattggtgggcatttggagtcctgctgtatgaaatgttggctgggcaggcaccctttgaaggggaggatgaagatgaactcttccaatccatcatggaacacaacgtagcctatcccaagtctatgtccaaggaagctgtggccatctgcaaagggctgatgaccaaacacccaggcaaacgtctgggttgtggacctgaaggcgaacgtgatatcaaagagcatgcatttttccggtatattgattgggagaaacttgaacgcaaagagatccagcccccttataagccaaaagcttgtgggcgaaatgctgaaaacttcgaccgatttttcacccgccatccaccagtcctaacacctcccgaccaggaagtcatcaggaatattgaccaatcagaattcgaaggattttcctttgttaactctgaatttttaaaacccgaagtcaagagctaagtagatgtgtagatctccgtccttcatttctgtcattcaagctcaacggctattgtggtgacatttttatgtttttcattgccaagttgcatccatgtttgattttctgatgagactagagtgacagtgtttcagaacccaaatgtcctcaggtagtttggagcatctctatgagatgggattatgcagatggcctatggaaaatgcagctgcataattaacacattatcaaagtcctcttacaatttattttccgcagcatgtcagctaagtagacccaatggggagagaaaatgcctgctttctttccctctttttctgcactgccatattcacccccaaccatccaatctgtggataattggatgttagcggtactcttccacttccgggcctggagcttggcttgtatccaagtgtatggttgctttgcctaagaggaatccctctatttcacctgttctggaggcaccagaccttgaaaagaacatgctcaaaataaaatgttatctgttatttttgtaaactcaaagttaagatgatcaaagttctaaaattccaagaatgtgcttttagacggtctcaatctaaaagcacttcaaggggtcaaagggcaaccagcttgggtgctacctcagtgttgtagtttctgatactttatgtctttgctcaccctcatccccaaactacttgaaaagggcatttggcaccactctctgaaacaacacagtcactctagcaaggcccccaaagggccctggttttacattacatttcaaactttatttgctttggggttttgtttctgttgttgttcaaatgcaaaaaaaagaaaaaaaaagaaaaaaaaaggtgactcacattgttacacatgctttaaaatatgtattcaaatgttattaaccacaatgacgacctgctttgatttaaccaagaagacggctgcggagcctagcagactcaggcctgtgggaatgggatttgttacaaatctaggtttgttactggcttcagaaagctaattaagtgctctgaaaaagacaccgtttcttgaaacaaagatggttgtattcctcactttgatgttgttttgcaagatgtttgtggaaatgttcatttgtatctggatctctgttatgtgccatttttcttctagcatcgagatacaataaaaaaaaaaaaaaagaaaagaagaagaaatactatttcaaggaaaactgctctttttgagaaacgtggacctaaactacaaagtgggaactgaggagggaactcaggagaaaggaactaactgcggagctttaatcttggccccagtgttcagccactcggaggggcgggggctgtggcccattcaggggctgctggtgggctgtagtggggtgggatgacctggccagagccaacgaggatactggagcccaaagtcaagtttagagaccagctgggaacgtgaatggggctcttgattttcttatcaaaatcaccactcctcccagcttggactaaatattctttctagcaagcagctttgtgagctccctgaagcccaaggaaacccttcggtgggagaaatttcatttctgtctgagaggattaaggcagcaggtgactccccctcctcgcctgccgtgtcctgctattctcaggcagctctaaggagaattcttatcacagttcaagtgatttccagaagttccagggcttctgagagaccatcaagggaactttaacaacttgacaaatgtccttgaagtaagatgcctcatctttagggaaaaatggggtttggatttctgcttaggcaaagtctcctgcagttcatccttctctgtcctcttcttgcttcaggcttggggaccgtccctgctgtccccactgtggtggcaatcaggacctaaggtgaagcaaacttgaagttctatctgacaagtttaggcagtaagagaaggagggaaatcggagcaaagctccctcactttattgttgagaaactggcatctggaaagaggaaggaatttgcccaaagtcagtcagctgggataaaaacctgggtgtcctgtccagaaagtgcagggtgctttctgctctgtagcaaggcagcagacatctctgagccaggcccaccaacaggcccttatctggtggttggatcatgatcccattttgcttggacatgctctcaggaagataaaaaccatggagaaacactaggccattgacaaatgatctgagacaactttagaaaacaatgtaggatgaatggaaagagaaagaaaggaaagaaagaagaaaaagaaagaaggaaagaaagaaagagaaaggaaggaaggaaagaaggaaggaaaagaaggaaggaaggaaggaatatagtgttataaatactgcactcaacattttccaaattcttgccattatttttcaaaagtttaatagtttgcagaaatagatactcaagccaaagtctgttttagagaaactttccatggaaagtcagaatttctaccacttccttttctatccacatttccagtgcagaagaaactgagaaacagagctttttgaagagaggacagggccatagcaacaaggaccttcttgggggattaatgggaggtcagtagaattaataaccctccttggatgagtgctactgttttcacatggcttcagatgctatcaacctcaaagaaatgatctcaacagagaagcttattctctcccaacttctacggtaaaatccaggagtattttctctggggatctgcccacaggacaaagtccataaaagcaagtcctgtctggaccatgtggttatctgaagcattagccatcaccagcacaacaaacggggcagggctttccaaggtggggctggtcagaagggaatctttgataagaggcccacaggcagggaaagcgaaatagggttgatgagaccaggggagacctaaaaaaaaggcagctttgtgtcttctagctccaaatatacctgccttttagctcacacactgtcctggagttctcagacctttaggggccctaacacagttcagttcatacaggggttcaaaagggacagtggcccatttgggagacctttaggatcaatgggaatcaattccattgttttgcctcagagtaaagtttctggctcggggacaattataagttgcaaaaaggatagaggcatatcccaagtcttccttcattccacaaataattacaaacaacctactgtgtgccaggcactattcttagcactggaaatacactagtgaagaagcagatgaggaccctgtttattgtttctctccaagaaattctccaagaatattgtttcttggagagaaataataaataaacaagacaatttctgaaagcaataagtgcaatcaagataattaaaggatgctaaagtgtgacttgtggggattgggagagagatgcacagacaatattaaagaggaggcattcgagctttgttgtgaacaccggaagtaacatgccgagcgcctgggggatggaaactcctatagcaccccacaggctaacagcaagcaggacaagacaaaaagggcaggtgggacatggtagagatggaccctacccaggaaacagctccatcagcatcttagcctgccccactctagccacacatacccacgtgtgctcctgagttcagtgtgcccacctcactcccacaccctcacatagacttggcaagagtaaggagggaactccatagagacattttacctatctcaggggagcagccacaaagaagcaagtcttgtaaaaggtcttttgcaaaggagagtgaacccagcaatgagagatccttaacagctagtgcccattagggggctaaacctaaagcctgggtggtgatggctcaaacgctaatgagtcagtgaatccttaccgaccccctggcctttataatctgaggcaactttggctgcagcccgggaatgtgcagggcactagggaatacaaggccttcttccctggttgtcttgtaataaaacagccatggggttgtccctccagtccgagagactgtgatgaggcctacatagcagcgatgtggtcaggtaaaaatcaggaacccactgaaatcttgggcaagccaccctgcctgcttgtgcctcggttctctcatatgtcatatataggaggtgaggactccagctccacctgccccaggtgggtgtggtgatgatgaggaaagacaagaggcttgcaaggaccctgaagaggtcggagcatcatacagattcctttattagcccacattctgatgttccctggtgagacttgccccaagcaattgctagtaaatgggggttaatttcttctccacctccctactgaacaaaaaaagaaatgccagacttactaggagaatcgagttgctttgagtttcttttgttttgttttgttttgttttgttttaaggctccccttacacaccctcctttaagctttgggttttctctcttatagtttgttgacacatgctaaaaatgtctttggagagaacttctgcctgataaacacccaattctagactgtgggtggattttcgagctgacggtggtcaattcctttcattaagcagtgatctgatttctccacatggccattctgccttcttgggggcagagtagatgggcagcagttcaccttttcagagaaagaggtcttctagccacctgggctgctactgaatggttttctccaggacgctctacctaatgattatttctataacattaagcatggtaataagtagcttccaattcaattcatcctaaagccaaagaaaatacagcaacacacacacacacacacacacacacacacacacacacacacacacaccactttatggcaattcttaactgacattcaatgacttacttcttttcttagaaaatttccaccacatttctatccccaagccaacatacaatgtgaaatgaaagccagtgcgtggagtgcagctgctaaaaattttcagcacagggctctttctgactctgctcatgagatggtatcagccacccaatgactggcgtatcttggtcctgtgtctttcttcttacgctgtgttaatgtgtttactttccatttggcagagagacaagagagacacctccaacttcgacaaagagttcaccagacagcctgtggaactgacccccactgataaactcttcatcatgaacttggaccaaaatgaatttgctggcttctcttatactaacccagagtttgtcattaatgtgtaggtgaatgcaaactccatcgttgagcctggggtgtaagacttcaagccaagcgtatgtatcaattctagtcttccaggattcacggtgcacatgctggcattcaacatgtggaaagcttgtcttagagggcttttctttgtatgtgtagcttgctagtttgttttctacatttgaaaatgtttagtttagaataagcgcattatccaattatagaggtacaattttccaaacttccagaaactcatcaaatgaacagacaatgtcaaaactactgtgtctgataccaaaatgcttcagtatttgtaatttttcaagtcagaagctgatgttcctggtaaaagtttttacagttattctataatatcttctttgaatgctaagcatgagcgatatttttaaaaattgtgagtaagctttgcagttactgtgaactattgtctcttggaggaagttttttgtttaagaattgatatgattaaactgaattaatatatgcaa

SEQ ID NO: 240 - DNA, 2804 bp, Artificial Sequence
  EMP1
aaagccagactgattcatagaaactcctttaaaacacggtgaaaagaaaccgcccattacacaccccagtacaccagcagaggaaacttataacctcgggaggcaggtccttcccctcagtgcggtcacatacttccagaagagcggaccagggctgctgccagcacctgccactcagagcgcctctgtcgctgggacccttcagaactctctttgctcacaagttaccaaaaaaaaaagagccaacatgttggtattgctggctggtatctttgtggtccacatcgctactgttattatgctatttgttagcaccattgccaatgtctggttggtttccaatacggtagatgcatcagtaggtctttggaaaaactgtaccaacattagctgcagtgacagcctgtcatatgccagtgaagatgccctcaagacagtgcaggccttcatgattctctctatcatcttctgtgtcattgccctcctggtcttcgtgttccagctcttcaccatggagaagggaaaccggttcttcctctcaggggccaccacactggtgtgctggctgtgcattcttgtgggggtgtccatctacactagtcattatgcgaatcgtgatggaacgcagtatcaccacggctattcctacatcctgggctggatctgcttctgcttcagcttcatcatcggcgttctctatctggtcctgagaaagaaataaggccggacgagttcatggggatctggggggtggggaggaggaagccgttgaatctgggagggaagtggaggttgctgtacaggaaaaaccgagataggggaggggggagggggaagcaaaggggggaggtcaaatcccaaaccattactgaggggattctctactgccaagcccctgccctggggagaaagtagttggctagtactttgatgctcccttgatggggtccagagagcctccctgcagccaccagacttggcctccagctgttcttagtgacacacactgtctggggccccatcagctgccacaacaccagccccacttctgggtcatgcactgaggtccacagacctactgcactgagttaaaatagcggtacaagttctggcaagagcagatactgtctttgtgctgaatacgctaagcctggaagccatcctgcccttctgacccaaagcaaaacatcacattccagtctgaagtgcctactggggggctttggcctgtgagccattgtccctctttggaacagatatttagctctgtggaattcagtgacaaaatgggaggaggaaagagagtttgtaaggtcatgctggtgggttagctaaaccaagaaggagaccttttcacaatggaaaacctgggggatggtcagagcccagtcgagacctcacacacggctgtccctcatggagacctcatgccatggtctttgctaggcctcttgctgaaagccaaggcagctcttctggagtttctctaaagtcactagtgaacaattcggtggtaaaagtaccacacaaactatgggatccaaggggcagtcttgcaacagtgccatgttagggttatgtttttaggattcccctcaatgcagtcagtgtttcttttaagtatacaacaggagagagatggacatggctcattgtagcacaatcctattactcttcctctaacatttttgaggaagttttgtctaattatcaatattgaggatcagggctcctaggctcagtggtagctctggcttagacaccacctggagtgatcacctcttggggaccctgcctatcccacttcacaggtgaggcatggcaattctggaagctgattaaaacacacataaaccaaaaccaaacaacaggcccttgggtgaaaggtgctatataattgtgaagtattaagcctaccgtatttcagccatgataagaacagagtgcctgcattcccaggaaaatacgaaaatcccatgagataaataaaaatataggtgatgggcagatcttttctttaaaataaaaaagcaaaaactcttgtggtacctagtcagatggtagacgagctgtctgctgccgcaggagcacctctatacaggacttagaagtagtatgttattcctggttaagcaggcattgctttgccctggagcagctattttaagccatctcagattctgtctaaaggggttttttgggaagacgttttctttatcgccctgagaagatctaccccagggagaatctgagacatcttgcctacttttctttattagctttctcctcatccatttcttttatacctttcctttttggggagttgttatgccatgatttttggtatttatgtaaaaggattattactaattctatttctctatgtttattctagttaaggaaatgttgagggcaagccaccaaattacctaggctgaggttagagagattggccagcaaaaactgtgggaagatgaactttgtcattatgatttcattatcacatgattatagaaggctgtcttagtgcaaaaaacatacttacatttcagacatatccaaagggaatactcacattttgttaagaagttgaactatgactggagtaaaccatgtattcccttatcttttactttttttctgtgacatttatgtctcatgtaatttgcattactctggtggattgttctagtactgtattgggcttcttcgttaatagattatttcatatactataattgtaaatattttgatacaaatgtttataactctagggatataaaaacagattctgattcccttca

SEQ ID NO: 241 - DNA, 705 bp, Artificial Sequence
  TNNC1
agcaagctgtcctgtgagccgccagcatggatgacatctacaaggctgcggtagagcagctgacagaagagcagaaaaatgagttcaaggcagccttcgacatcttcgtgctgggcgctgaggatggctgcatcagcaccaaggagctgggcaaggtgatgaggatgctgggccagaaccccacccctgaggagctgcaggagatgatcgatgaggtggacgaggacggcagcggcacggtggactttgatgagttcctggtcatgatggttcggtgcatgaaggacgacagcaaagggaaatctgaggaggagctgtctgacctcttccgcatgtttgacaaaaatgctgatggctacatcgacctggatgagctgaagataatgctgcaggctacaggcgagaccatcacggaggacgacatcgaggagctcatgaaggacggagacaagaacaacgacggccgcatcgactatgatgagttcctggagttcatgaagggtgtggagtagatgctgaccttcacccagagctgcctatgcccagcctccaactccagctgagtcctggggttggggagggggtcggggtcccaggacctgagcctggccatgtcctcaaccccaaatcccccgactccctccccagatctgtcctgggggatgcaaataaagcctgctctcccaaggtctgctaaaaaaaaaa

SEQ ID NO: 242 - DNA, 4704 bp, Artificial Sequence
  BTG1
acttccttttcgtggcactataaagggtgctgcacggcgcttgcatctcttcgcctctcggagctggaaatgcagctattgagatcttcgaatgctgcggagctggaggcggaggcagctggggaggtccgagcgatgtgaccaggccgccatcgctcgtctcttcctctctcctgccgcctcctgtctcgaaaataacttttttagtctaaagaaagaaagacaaaagtagtcgtccgcccctcacgccctctcttcctctcagccttccgcccggtgaggaagcccggggtggctgctccgccgtcggggccgcgccgccgagccccagccgccccgggccgcccccgcacgccgcccccatgcatcccttctacacccgggccgccaccatgataggcgagatcgccgccgccgtgtccttcatctccaagtttctccgcaccaaggggctcacgagcgagcgacagctgcagaccttcagccagagcctgcaggagctgctggcagaacattataaacatcactggttcccagaaaagccatgcaagggatcgggttaccgttgtattcgcatcaaccataaaatggatcctctgattggacaggcagcacagcggattggactgagcagtcaggagctgttcaggcttctcccaagtgaactcacactctgggttgacccctatgaagtgtcctacagaattggagaggatggctccatctgtgtgctgtatgaagcctcaccagcaggaggtagcactcaaaacagcaccaacgtgcaaatggtagacagccgaatcagctgtaaggaggaacttctcttgggcagaacgagcccttccaaaaactacaatatgatgactgtatcaggttaagatatagtctgtggatggatcatctgatgatgatggataaatttgatttttgctttgggtgggctcctcttggggatggattatggaatttaaaccatgtcacagctgtgaagatctggcacaagatagaatggtaaaaaaaaaaaaaattttaagtgacagtgccatagtttggacagtacctttcaatgattaattttaatagcctgtgagtccaagtaaatgatcactttatttgctagggagggaagtcctagggtggtttcagtttctcccagacatacctaaatttttacatcaatccttttaaagaaaatctgtatttcaaagaatctttctctgcagtaaatctcgcaggggaatttgcactattacacttgaaagttgttattgttaaccttttcggcagcttttaataggaaagttaaacgttttaaacatggtagtactggaaattttacaagacttttacctagcacttaaatatgtataaatgtacataaagacaaactagtaagcatgacctggggaaatggtcagaccttgtattgtgtttttggccttgaaagtagcaagtgaccagaatctgccatggcaacaggctttaaaaaagacccttaaaaagacactgtctcaactgtggtgttagcaccagccagctctctgtacatttgctagcttgtagttttctaagactgagtaaacttcttatttttagaaagtggaggtctggtttgtaactttccttgtacttaattgggtaaaagtcttttccacaaaccaccatctattttgtgaactttgttagtcatcttttatttggtaaattatgaactggtgtaaatttgtacagttcatgtatattgattgtggcaaagttgtacagatttctatattttggatgagaaatttttcttctctctataataaatcgtttcttatcttggcattttaatcaatctcttgtcatgattatagaggtttagctaaaagtattttttcttagaagacaggttctataaactgaatctctgttgcacactggtcatgctggaaaaacatttgatgaggaatgaagatgctctgtatatacatgtttaggttttacaggaaacacaggagtagcatgttttaaaaatttctaaagtcaaaacatggacacattcacaggctaatgatctcatgaaataaggataagagaccacggtagcatctaccaaaaatgtgatactcaaaggattacatttcattgcttccctgttgaagtgaagatataaatgttccattctgacccacctttgaaaaacaattactttgccccatggattctttgttcaattagaaatttccccggggcaggtgacccatagtcttaaagaacaggctaaacaccacagagagattggttgctttttgcttttcatcacctgcaagatgtacataaaaatcacataagctggaattcaacaaaaggtatgtttatgaacttttattctcaaaagttgaaatgctgactttctcgattcctcattttcagacttttatttcagataaatactaaaaacctaagtgaaccttgataatgctgtagtgtagattacttcactaccccatataatagaaggacttgctgtttagttgtagaggataacagcgtttttcagtggaaattgaaagtggaaaaattgaattttgctctacacagttaacatatagtggcctttttttggtatatatgtaaacatgttgacactggaaatacgcagtctgaaataaaattagtaattacttgaaattagtaatctcaaataacttttaagaagttatttctacacccaggaataaattattctgattttgtagacaacacaggaataggccactgaatatgcaggtatttagagtacaaatgtctgtggatattattggcacaccattctcgagagttagaattcgtagacccgcaacacatggactacccttgccaattgttatggttttatttttaaacctattctgtgaaaaagctcctcggtatttcaaacttgaattacaataaaaacaccaggtagggttgtttttaaatgggtctcaccccagtgctgactactgttgtttaccaactacatttcatctggtaactccattgaaactaagtacctcaaccattttttttttttatcataaagccttttttcaaatggaaagttgtttttgaagatcttgacatcagactttttcaatctttgaaaatgatggaaacagttaataaaaatgtttattttagaattcaggtgatgtctggcttgtgaggagctgtttataagtttgtctttgaaaaaggcttgcacacatcactctgagaccagctgtttcctgtgactttaaccttaccttccccagacaattgagctgaacctgtatctgcggtacagtagctgtttgtgatgtatttcttgttcactgtttctggggaatgttttgaaatattttattataaatccttttaagataggatgactactttcaaaattattgttgcctttggcaccaggaattcatagttgtgattggcagtaagtttgaggagtgttactttctaagttttaacaggtagttttgaaattatttccttttttccaaatttaagtagtgcctccctctgtaatgttgaaacaaggcttcaagtggattgtatagcaagagttaccctggttcatgcaggataatgcggctgttatctttgtcatctggaatgggaatctcatgtctttatccttatgtgcaatatttctataataatagactggaaaggccaccagaaagtggctttcaggtacattgcacaaatagtttccttaagtcattataactcacacattgcaagtaattaattttgttttgtataggtgttgcagtttatgaaattggccttcaagttaaaaggaaggaagccgtattcccgatggctagtgtttaatgactacaggtttccaggctccctttaatcttgggagcaaataaatctactattggacttctccctgcgtgacttttaacatttctgatactctctcttcttcctctttacagaagagaggtatgataactgaagttgtactttgcatattgaagtttaaagatacttcctctccccttttcacccctatttcaaatgatgtgataaaatcctcttgataggctatatggagaacatttgtcaatagttttatctatgcatggaagtcttcaaaaagtatatcttggattgtctaaaactgaatagatttcttatttatctgaaggtatacagactgccaacattttagacttatctctcagtctctgccactgaacttttatatatggctgctatcaaaatataaccggtttattttcatatttggaactaatataacagtatcacaaaatcttttacagtaagatagtttgtaataccagccgacccagctgcttaactgagtccttaaatcatttaatatatgggactgtaaatagagaaatctgtacattatgagatctgatttctggttatgcctatagatctttattttctttatccctatagatcattttcttctgatgttaagtgttatatttttgaaatgctcctaaacaagtaagccttagattgtattaatcctgaggattgataccatttcctcaacactttgtggagtatgattgacaccagtttttttttgactgcaggtttaacttggcttatcacttttcgtattgctcagtatgtccaagataggaataaaaaaatgtagttcaaaaaaaaaaaaaaaaaaaaaaaaaa

SEQ ID NO: 243 - DNA, 1861 bp, Artificial Sequence
  KRT15
cactcaaggtgtgcaggcagctgtgtttgtcaggaaggcagaaggagttggctttgctttaggggaggagacgaggtcccacaacaccctctgaagggtatataaggagccccagcgtgcagcctggcctggtacctcctgccagcatctcttgggtttgctgagaactcacgggctccagctacctggccatgaccaccacatttctgcaaacttcttcctccacctttgggggtggctcaacccgagggggttccctcctggctgggggaggtggctttggtggggggagtctctctgggggaggtggaagccgaagtatctcagcttcttctgctaggtttgtctcttcagggtcaggaggaggatatgggggtggcatgagggtctgtggctttggtggaggggctggtagtgttttcggtggaggctttggagggggcgttggtgggggttttggtggtggctttggtggtggcgatggtggtctcctctctggcaatgagaaaattaccatgcagaacctcaatgaccgcctggcctcctacctggacaaggtacgtgccctggaggaggccaatgctgacctggaggtgaagatccatgactggtaccagaagcagaccccaaccagcccagaatgcgactacagccaatacttcaagaccattgaagagctccgggacaagatcatggccaccaccatcgacaactcccgggtcatcctggagatcgacaatgccaggctggctgcggacgacttcaggctcaagtatgagaatgagctggccctgcgccagggcgttgaggctgacatcaacggcttgcgccgagtcctggatgagctgaccctggccaggactgacctggagatgcagatcgagggcctgaatgaggagctagcctacctgaagaagaaccacgaagaggagatgaaggagttcagcagccagctggccggccaggtcaatgtggagatggacgcagcaccgggtgtggacctgacccgtgtgctggcagagatgagggagcagtacgaggccatggcggagaagaaccgccgggatgtcgaggcctggttcttcagcaagactgaggagctgaacaaagaggtggcctccaacacagaaatgatccagaccagcaagacggagatcacagacctgagacgcacgatgcaggagctggagatcgagctgcagtcccagctcagcatgaaagctgggctggagaactcactggccgagacagagtgccgctatgccacgcagctgcagcagatccaggggctcattggtggcctggaggcccagctgagtgagctccgatgcgagatggaggctcagaaccaggagtacaagatgctgcttgacataaagacacggctggagcaggagatcgctacttaccgcagcctgctcgagggccaggatgccaagatggctggcattggcatcagggaagcctcttcaggaggtggtggtagcagcagcaatttccacatcaatgtagaagagtcagtggatggacaggtggtttcttcccacaagagagaaatctaagtgtctattgcaggagaaacgtcccttgccactccccactctcatcaggccaagtggaggactggccagagggcctgcacatgcaaactccagtccctgccttcagagagctgaaaagggtccctcggtcttttatttcagggctttgcatgcgctctattccccctctgcctctccccaccttctttggagcaaggagatgcagctgtattgtgtaacaagctcatttgtacagtgtctgttcatgtaataaagaattacttttccttttgcaaataaaaaaaaaaaaaaaaaaaaaa

SEQ ID NO: 244 - DNA, 1731 bp, Artificial Sequence
  EPCAM
aactgcagcgccggggctgggggaggggagcctactcactcccccaactcccgggcggtgactcatcaacgagcaccagcggccagaggtgagcagtcccgggaaggggccgagaggcggggccgccaggtcgggcaggtgtgcgctccgccccgccgcgcgcacagagcgctagtccttcggcgagcgagcaccttcgacgcggtccggggaccccctcgtcgctgtcctcccgacgcggacccgcgtgccccaggcctcgcgctgcccggccggctcctcgtgtcccactcccggcgcacgccctcccgcgagtcccgggcccctcccgcgcccctcttctcggcgcgcgcgcagcatggcgcccccgcaggtcctcgcgttcgggcttctgcttgccgcggcgacggcgacttttgccgcagctcaggaagaatgtgtctgtgaaaactacaagctggccgtaaactgctttgtgaataataatcgtcaatgccagtgtacttcagttggtgcacaaaatactgtcatttgctcaaagctggctgccaaatgtttggtgatgaaggcagaaatgaatggctcaaaacttgggagaagagcaaaacctgaaggggccctccagaacaatgatgggctttatgatcctgactgcgatgagagcgggctctttaaggccaagcagtgcaacggcacctccatgtgctggtgtgtgaacactgctggggtcagaagaacagacaaggacactgaaataacctgctctgagcgagtgagaacctactggatcatcattgaactaaaacacaaagcaagagaaaaaccttatgatagtaaaagtttgcggactgcacttcagaaggagatcacaacgcgttatcaactggatccaaaatttatcacgagtattttgtatgagaataatgttatcactattgatctggttcaaaattcttctcaaaaaactcagaatgatgtggacatagctgatgtggcttattattttgaaaaagatgttaaaggtgaatccttgtttcattctaagaaaatggacctgacagtaaatggggaacaactggatctggatcctggtcaaactttaatttattatgttgatgaaaaagcacctgaattctcaatgcagggtctaaaagctggtgttattgctgttattgtggttgtggtgatagcagttgttgctggaattgttgtgctggttatttccagaaagaagagaatggcaaagtatgagaaggctgagataaaggagatgggtgagatgcatagggaactcaatgcataactatataatttgaagattatagaagaagggaaatagcaaatggacacaaattacaaatgtgtgtgcgtgggacgaagacatctttgaaggtcatgagtttgttagtttaacatcatatatttgtaatagtgaaacctgtactcaaaatataagcagcttgaaactggctttaccaatcttgaaatttgaccacaagtgtcttatatatgcagatctaatgtaaaatccagaacttggactccatcgttaaaattatttatgtgtaacattcaaatgtgtgcattaaatatgcttccacagtaaaatctgaaaaactgatttgtgattgaaagctgcctttctatttacttgagtcttgtacatacatacttttttatgagctatgaaataaaacattttaaactgaatttcttaaaaaaaaaaaaaaa

SEQ ID NO: 245 - DNA, 2666 bp, Artificial Sequence
  CHGB
agaccctgcacaccaggcgactggactggcgtaaatttccgcccatttgcgtcgccgcctgggggtgctgcttcgtgacgtcagggctgagctagggggcgcccgctcctggctgcccgctcctcccggccctgcggcccccgcctgccctttaaaagagcggggcctgcgccggccgcgccacaccgcggggaccaggaggcacgctggttttccggggccgctccatcgcgccttcctcctgcgcctcgcttctccggtccagccgccatcttcctttccgcacaggggccgccgagcggggccatgcagccaacgctgcttctcagcctcctgggagccgtggggctggcggctgtcaattccatgccagtggataacaggaaccacaatgaaggaatggtgactcgctgcatcattgaggtcctctcaaatgccttgtcgaagtccagcgctccacccatcacccctgagtgccgccaagtcctgaagacgagtagaaaagacgtcaaagacaaagagacaactgaaaatgaaaacacaaagtttgaagtaagattgttaagagacccagctgatgcctcggaagcccacgagtcctccagcaggggagaggcaggagccccaggggaggaggacatccaaggcccaacaaaggcagacacagagaaatgggcagagggaggcgggcacagccgagagcgagcggatgagccccagtggagcctctatccctccgacagccaagtctctgaagaagtgaagacacgccattctgagaagagccagagagaggatgaggaggaggaggagggagagaactatcaaaaaggggagcgaggggaagatagcagtgaagagaaacaccttgaagagccaggagagacacaaaacgcttttctcaatgaaagaaagcaggcttcagctataaaaaaagaggagttagtggccagatcggaaacacatgctgccgggcattctcaggagaagacacatagccgagagaagagtagccaggagagtggagaggagacagggagccaggagaatcacccccaggagtctaaaggccaaccccgaagccaggaagaatctgaggaaggtgaggaagatgccacctctgaggtggacaaacgacgcacgaggcccagacaccaccacgggaggagcaggcccgacaggtcctctcaaggagggagtcttccctctgaggaaaagggacacccccaggaggaatctgaggagtcaaacgtcagcatggccagtttaggggaaaagagggaccaccattcaacccactacagggcttcagaggaagaacctgaatatggagaagaaataaagggttatccaggcgtccaggcccctgaggacctggagtgggagcgctataggggcagaggaagtgaagaatacagggctccaagacctcagagtgaggagagttgggatgaggaggacaagagaaactaccccagcttagagcttgataagatggcacatggatatggtgaagaaagtgaggaagagaggggccttgagccgggaaagggacgccatcacagaggcaggggaggggagccacgtgcctatttcatgtctgacaccagagaagagaaaaggttcttgggtgaaggacaccaccgtgtccaagaaaaccagatggacaaggcaaggaggcatccacaaggtgcgtggaaagagctggacagaaattatctcaactacggtgaggaaggagccccagggaagtggcagcagcagggagacctgcaggacactaaagaaaacagggaggaagctaggtttcaagataaacaatatagctcccatcacacagctgaaaagaggaagagattaggggaactgttcaacccatactacgaccctctccagtggaagagcagccattttgaaagaagagacaacatgaatgacaattttctcgagggtgaggaggaaaatgagctgaccttgaacgagaagaatttcttcccagaatacaactatgactggtgggagaaaaagcccttctctgaggatgtgaactgggggtatgagaagagaaacctcgccagggtccccaagctggacctgaaaaggcaatatgacagggtggcccaactggaccagctccttcactacaggaagaagtcagctgagtttccagacttctatgattctgaggagccggtgagcacccaccaggaggcagaaaatgaaaaggacagggctgaccagacagtcctgacagaggacgagaaaaaagaactcgaaaacttggctgcaatggatttggaactacagaagatagctgagaaattcagccaaaggggctgactgtcattggagcggtgggcactgttaagaagcagccatcacatgatctgtttttcaccacttcactgaaagacaccatttatctacccaagggcagaaagtagaacttactattcattaaatgtttgacacaattggaattgtctttaatttctgtcagaatgctattgaaaatgtgaattgcatgacttgtagcatattcttttctgcaaaatagacatattaacatgcttatgacaatgactgtgctactgtctttggaaaaatgtttgtctcagttggaaataataaaagattcacctgagaccaaaaaaaaaaaaaaaaaa

SEQ ID NO: 246 - DNA, 1676 bp, Artificial Sequence
  CD69
agactcaacaagagctccagcaaagactttcactgtagcttgacttgacctgagattaactagggaatcttgagaataaagatgagctctgaaaattgtttcgtagcagagaacagctctttgcatccggagagtggacaagaaaatgatgccaccagtccccatttctcaacacgtcatgaagggtccttccaagttcctgtcctgtgtgctgtaatgaatgtggtcttcatcaccattttaatcatagctctcattgccttatcagtgggccaatacaattgtccaggccaatacacattctcaatgccatcagacagccatgtttcttcatgctctgaggactgggttggctaccagaggaaatgctactttatttctactgtgaagaggagctggacttcagcccaaaatgcttgttctgaacatggtgctactcttgctgtcattgattctgaaaaggacatgaactttctaaaacgatacgcaggtagagaggaacactgggttggactgaaaaaggaacctggtcacccatggaagtggtcaaatggcaaagaatttaacaactggttcaacgttacagggtctgacaagtgtgtttttctgaaaaacacagaggtcagcagcatggaatgtgagaagaatttatactggatatgtaacaaaccttacaaataataaggaaacatgttcacttattgactattatagaatggaactcaaggaaatctgtgtcagtggatgctgctctgtggtccgaagtcttccatagagactttgtgaaaaaaaattttatagtgtcttgggaattttcttccaaacagaactatggaaaaaaaggaagaaattccaggaaaatctgcactgtgggcttttattgccatgagctagaagcatcacaggttgaccaataaccatgcccaagaatgagaagaatgactatgcaacctttggatgcactttatattattttgaatccagaaataatgaaataactaggcgtggacttactatttattgctgaatgactaccaacagtgagagcccttcatgcatttgcactattggaaggagttagatgttggtactagatactgaatgtaaacaaaggaattatggctggtaacataggtttttagtctaattgaatcccttaaactcagggagcatttataaatggacaaatgcttatgaaactaagatttgtaatatttctctctttttagagaaatttgccaatttactttgttatttttccccaaaaagaatgggatgatcatgtatttatttttttacttcctcagctgtagacaggtccttttcgatggtacatatttctttgcctttataatcttttatacagtgtcttacagagaaaagacataagcaaagactatgaggaatatttgcaagacatagaatagtgttggaaaatgtgcaatatgtgatgtggcaaatctctattaggaaatattctgtaatcttcagacctagaataatactagtcttataataggtttgtgactttcctaaatcaattctattacgtgcaatacttcaatacttcatttaaaatatttttatgtgcaataaaatgtatttgtttgtattttgtgttcagtacaattataagctgtttttatatatgtgaaataaaagtagaataaacacaa

SEQ ID NO: 247 - DNA, 4295 bp, Artificial Sequence
  PIGR
gagcagagtttcagttttggcagcagcgtccagtgccctgccagtagctcctagagaggcaggggttaccaactggccagcaggctgtgtccctgaagtcagatcaacgggagagaaggaagtggctaaaacattgcacaggagaagtcggcctgagtggtgcggcgctcgggacccaccagcaatgctgctcttcgtgctcacctgcctgctggcggtcttcccagccatctccacgaagagtcccatatttggtcccgaggaggtgaatagtgtggaaggtaactcagtgtccatcacgtgctactacccacccacctctgtcaaccggcacacccggaagtactggtgccggcagggagctagaggtggctgcataaccctcatctcctcggagggctacgtctccagcaaatatgcaggcagggctaacctcaccaacttcccggagaacggcacatttgtggtgaacattgcccagctgagccaggatgactccgggcgctacaagtgtggcctgggcatcaatagccgaggcctgtcctttgatgtcagcctggaggtcagccagggtcctgggctcctaaatgacactaaagtctacacagtggacctgggcagaacggtgaccatcaactgccctttcaagactgagaatgctcaaaagaggaagtccttgtacaagcagataggcctgtaccctgtgctggtcatcgactccagtggttatgtaaatcccaactatacaggaagaatacgccttgatattcagggtactggccagttactgttcagcgttgtcatcaaccaactcaggctcagcgatgctgggcagtatctctgccaggctggggatgattccaatagtaataagaagaatgctgacctccaagtgctaaagcccgagcccgagctggtttatgaagacctgaggggctcagtgaccttccactgtgccctgggccctgaggtggcaaacgtggccaaatttctgtgccgacagagcagtggggaaaactgtgacgtggtcgtcaacaccctggggaagagggccccagcctttgagggcaggatcctgctcaacccccaggacaaggatggctcattcagtgtggtgatcacaggcctgaggaaggaggatgcagggcgctacctgtgtggagcccattcggatggtcagctgcaggaaggctcgcctatccaggcctggcaactcttcgtcaatgaggagtccacgattccccgcagccccactgtggtgaagggggtggcaggaggctctgtggccgtgctctgcccctacaaccgtaaggaaagcaaaagcatcaagtactggtgtctctgggaaggggcccagaatggccgctgccccctgctggtggacagcgaggggtgggttaaggcccagtacgagggccgcctctccctgctggaggagccaggcaacggcaccttcactgtcatcctcaaccagctcaccagccgggacgccggcttctactggtgtctgaccaacggcgatactctctggaggaccaccgtggagatcaagattatcgaaggagaaccaaacctcaaggtaccagggaatgtcacggctgtgctgggagagactctcaaggtcccctgtcactttccatgcaaattctcctcgtacgagaaatactggtgcaagtggaataacacgggctgccaggccctgcccagccaagacgaaggccccagcaaggccttcgtgaactgtgacgagaacagccggcttgtctccctgaccctgaacctggtgaccagggctgatgagggctggtactggtgtggagtgaagcagggccacttctatggagagactgcagccgtctatgtggcagttgaagagaggaaggcagcggggtcccgcgatgtcagcctagcgaaggcagacgctgctcctgatgagaaggtgctagactctggttttcgggagattgagaacaaagccattcaggatcccaggctttttgcagaggaaaaggcggtggcagatacaagagatcaagccgatgggagcagagcatctgtggattccggcagctctgaggaacaaggtggaagctccagagcgctggtctccaccctggtgcccctgggcctggtgctggcagtgggagccgtggctgtgggggtggccagagcccggcacaggaagaacgtcgaccgagtttcaatcagaagctacaggacagacattagcatgtcagacttcgagaactccagggaatttggagccaatgacaacatgggagcctcttcgatcactcaggagacatccctcggaggaaaagaagagtttgttgccaccactgagagcaccacagagaccaaagaacccaagaaggcaaaaaggtcatccaaggaggaagccgagatggcctacaaagacttcctgctccagtccagcaccgtggccgccgaggcccaggacggcccccaggaagcctagacggtgtcgccgcctgctccctgcacccatgacaatcaccttcagaatcatgtcgatcctggggccctcagctcctggggaccccactccctgctctaacacctgcctaggtttttcctactgtcctcagaggcgtgctggtcccctcctcagtgacatcaaagcctggcctaattgttcctattggggatgagggtggcatgaggaggtcccacttgcaacttctttctgttgagagaacctcaggtacggagaagaatagaggtcctcatgggtcccttgaaggaagagggaccagggtgggagagctgattgcagaaaggagagacgtgcagcgcccctctgcacccttatcatgggatgtcaacagaatttttccctccactccatccctccctcccgtccttcccctcttcttctttccttccatcaaaagatgtatttgaattcatactagaattcaggtgctttgctagatgctgtgacaggtatgccaccaacactgctcacagcctttctgaggacaccagtgaaagaagccacagctcttcttggcgtatttatactcactgagtcttaacttttcaccaggggtgctcacctctgcccctattgggagaggtcataaaatgtctcgagtcctaaggccttaggggtcatgtatgatgagcatacacacaggtaattataaacccacattcttaccatttcacacataagaaaattgaggtttggaagagtgaagcgtttttctttttcttttttttttttgagacggagtctctcactgtcgcccaggctggagtgcagtggcgcaatctcggctcactgcaacctccgcctcccaggttgacaccattctcctgcctcaccctcccaagtagctgggactacaggcgcctgccagcacgcctggctaattttttgtatttttagtagagacagggtttcaccgtgttagccaggatggtctcgatctcctgacctcgtgatccgcctgcctctgcctcccaaagtgctgggattacaggcgtgagccaccgcgtccggcctctttttttcttttcttttttttgagacaaagtctcactgtgtcacccagactggaatgcagtgacacaatctcggctcactgaaacctctgccttccaggttcaagctattctcatgcctcagcctctcaagtagctgggactacagatgtgggccaccatgtctggctaattttttttttttttttttttttttgtagagacagggtttcgccatgttgacgagactggtctcgaactcctggcctcaagtgatctgccgcctcagcttctcaaagtactgggattatataggcatgagccactgagcctggccctgaagcgtttttctcaaaggccctcagtgagataaattagatttggcatctcctgtcctgggccagggatctctctacaagagcccctgcccctctgttggaggcacagttttagaataaggaggaggagggagaagagaaaatgtaaaggagggagatctttcccaggccgcaccatttctgtcactcacatggacccaagataaaagaatggccaaaccctcacaacccctgatgtttgaagagttccaagttgaagggaaacaaagaagtgtttgatggtgccagagaggggctgctctccagaaagctaaaatttaatttcttttttcctctgagttctgtacttcaaccagcctacaagctggcacttgctaacaaatcagaaatatgacaattaatgattaaagactgtgattgccaccaaaaaaaaaaaaaaaaaaaaaa

SEQ ID NO: 248 - DNA, 1307 bp, Artificial Sequence
  PPBP
acttatctgcagacttgtaggcagcaactcaccctcactcagaggtcttctggttctggaaacaactctagctcagccttctccaccatgagcctcagacttgataccaccccttcctgtaacagtgcgagaccacttcatgccttgcaggtgctgctgcttctgtcattgctgctgactgctctggcttcctccaccaaaggacaaactaagagaaacttggcgaaaggcaaagaggaaagtctagacagtgacttgtatgctgaactccgctgcatgtgtataaagacaacctctggaattcatcccaaaaacatccaaagtttggaagtgatcgggaaaggaacccattgcaaccaagtcgaagtgatagccacactgaaggatgggaggaaaatctgcctggacccagatgctcccagaatcaagaaaattgtacagaaaaaattggcaggtgatgaatctgctgattaatttgttctgtttctgccaaacttctttaactcccaggaagggtagaattttgaaaccttgattttctagagttctcatttattcaggatacctattcttactgtattaaaatttggatatgtgtttcattctgtctcaaaaatcacattttattctgagaaggttggttaaaagatggcagaaagaagatgaaaataaataagcctggtttcaaccctctaattcttgcctaaacattggactgtactttgcatttttttctttaaaaatttctattctaacacaacttggttgatttttcctggtctactttatggttattagacatactcatgggtattattagatttcataatggtcaatgataataggaattacatggagcccaacagagaatatttgctcaatacatttttgttaatatatttaggaacttaatggagtctctcagtgtcttagtcctaggatgtcttatttaaaatactccctgaaagtttattctgatgtttattttagccatcaaacactaaaataataaattggtgaatatgaatcttataaactgtggttagctggtttaaagtgaatatatttgccactagtagaacaaaaatagatgatgaaaatgaattaacatatctacatagttataattctatcattagaatgagccttataaataagtacaatataggacttcaaccttactagactcctaattctaaattctacttttttcatcaacagaactttcattcattttttaaaccctaaaacttatacccacactattcttacaaaaatattcacatgaaataaaaatttgctattga

SEQ ID NO: 249 - DNA, 1749 bp, Artificial Sequence
  DPT
gtgacattgtttgccaaaatcccaggcagcatggacctcagtcttctctgggtacttctgcccctagtcaccatggcctggggccagtatggcgattatggatacccataccagcagtatcatgactacagcgatgatgggtgggtgaatttgaaccggcaaggcttcagctaccagtgtccccaggggcaggtgatagtggccgtgaggagcatcttcagcaagaaggaaggttctgacagacaatggaactacgcctgcatgcccacgccacagagcctcggggaacccacggagtgctggtgggaggagatcaacagggctggcatggaatggtaccagacgtgctccaacaatgggctggtggcaggattccagagccgctacttcgagtcagtgctggatcgggagtggcagttttactgttgtcgctacagcaagaggtgcccatattcctgctggctaacaacagaatatccaggtcactatggtgaggaaatggacatgatttcctacaattatgattactatatccgaggagcaacaaccactttctctgcagtggaaagggatcgccagtggaagttcataatgtgccggatgactgaatacgactgtgaatttgcaaatgtttagatttgccacataccaaatctgggtgaaaggaaaggggccggggacaggagggtgtccacatatgttaacatcagttggatctcctatagaagtttctgctgctctctttccttctccctgagctggtaactgcaatgccaacttcctgggcctttctgactagtatcacacttctaataaaatccacaattaaaccatgtttctcacttttcacatgtttcatagcaactgctttatatgactgatgatggcttccttgcacaccacatatacagtgcgcatgcttacagccgggcttctggagcaccagctgcagcctggctactgctttttactgcagaatgaactgcaagttcagcatagtggaggggagaggcagaactggaggagaggtgcagtgaaggttctctacagctaagcctgtttgaatgatacgtaggttccccaccaaaagcaggctttctgccctgagggacatcttcccactcccctgctccacatgagccatgcatgcttagcaatccaagtgcagagctctttgctccaggagtgaggagactgggaggtgaaatggggaaatggaagggtttggaggcagagctgaaaacagggttggaaggatttcctgaattagaagacaaacgttagcatacccagtaaggaaaatgagtgcaggggccaggggaacccgtgaggatcactctcaaatgagattaaaaacaaggaagcagagaatggtcagagaatgggattcagattgggaacttgtggggatgagagtgaccaggttgaactgggaagtggaaaaaggagtttgagtcactggcacctagaagcctgcccacgattcctaggaaggctggcagacaccctggaaccctggggagctactggcaaactctcctggattgggcctgatttttttggtgggaaaggctgccctggggatcaactttccttctgtgtgtggctcaggagttcttctgcagagatggcgctatctttcctcctcctgtgatgtcctgctcccaaccatttgtactcttcattacaaaagaaataaaaatattaacgttcactatgctgaaaataaaaaaaaaaaaaaaaaaaaaa

SEQ ID NO: 250 - DNA, 830 bp, Artificial Sequence
  REG3A
caaaccataccatatcccaccagagagtgactcctgattgcctcctcaagtcgcagacactatgctgcctcccatggccctgcccagtgtatcttggatgctgctttcctgcctcatgctgctgtctcaggttcaaggtgaagaaccccagagggaactgccctctgcacggatccgctgtcccaaaggctccaaggcctatggctcccactgctatgccttgtttttgtcaccaaaatcctggacagatgcagatctggcctgccagaagcggccctctggaaacctggtgtctgtgctcagtggggctgagggatccttcgtgtcctccctggtgaagagcattggtaacagctactcatacgtctggattgggctccatgaccccacacagggcaccgagcccaatggagaaggttgggagtggagtagcagtgatgtgatgaattactttgcatgggagagaaatccctccaccatctcaagccccggccactgtgcgagcctgtcgagaagcacagcatttctgaggtggaaagattataactgtaatgtgaggttaccctatgtctgcaagttcactgactagtgcaggagggaagtcagcagcctgtgtttggtgtgcaactcatcatgggcatgagaccagtgtgaggactcaccctggaagagaatattcgcttaattcccccaacctgaccacctcattcttatctttcttctgtttcttcctccccgctgtcatttcagtctcttcattttgtcatacggcctaaggctttaaagagcaataaaatttttagtctgcaaaaaaaaaaaaaaaaaaaaaa

SEQ ID NO: 251 - DNA, 532 bp, Artificial Sequence
  S100A8
gagaaaccagagactgtagcaactctggcagggagaagctgtctctgatggcctgaagctgtgggcagctggccaagcctaaccgctataaaaaggagctgcctctcagccctgcatgtctcttgtcagctgtctttcagaagacctggtggggcaagtccgtgggcatcatgttgaccgagctggagaaagccttgaactctatcatcgacgtctaccacaagtactccctgataaaggggaatttccatgccgtctacagggatgacctgaagaaattgctagagaccgagtgtcctcagtatatcaggaaaaagggtgcagacgtctggttcaaagagttggatatcaacactgatggtgcagttaacttccaggagttcctcattctggtgataaagatgggcgtggcagcccacaaaaaaagccatgaagaaagccacaaagagtagctgagttactgggcccagaggctgggcccctggacatgtacctgcagaataataaagtcatcaatacctcaaaaaaaaaa

SEQ ID NO: 252 - DNA, 2095 bp, Artificial Sequence
  NKX2-2
gcggccgccggagcccgagctgacgccgccttggcacccctcctggagttagaaactaaggccggggcccgcggcgctcggcgcgcaggccgcccggcttcctgcgtccatttccgcgtgctttcaaagaagacagagagaggcactgggttgggcttcatttttttcctccccatccccagtttctttctctttttaaaaataataattatcccaataattaaagccaattcccccctcccctcccccagtccctccccccaactcccccctcccccgcccgccggggcaggggagcgccacgaattgaccaagtgaagctacaactttgcgacataaattttggggtctcgaaccatgtcgctgaccaacacaaagacggggttttcggtcaaggacatcttagacctgccggacaccaacgatgaggagggctctgtggccgaaggtccggaggaagagaacgaggggcccgagccagccaagagggccgggccgctggggcagggcgccctggacgcggtgcagagcctgcccctgaagaaccccttctacgacagcagcgacaacccgtacacgcgctggctggccagcaccgagggccttcagtactccctgcacggtctggctgccggggcgccccctcaggactcaagctccaagtccccggagccctcggccgacgagtcaccggacaatgacaaggagaccccgggcggcgggggggacgccggcaagaagcgaaagcggcgagtgcttttctccaaggcgcagacctacgagctggagcggcgctttcggcagcagcggtacctgtcggcgcccgagcgcgaacacctggccagcctcatccgcctcacgcccacgcaggtcaagatctggttccagaaccaccgctacaagatgaagcgcgcccgggccgagaaaggtatggaggtgacgcccctgccctcgccgcgccgggtggccgtgcccgtcttggtcagggacggcaaaccatgtcacgcgctcaaagcccaggacctggcagccgccaccttccaggcgggcattcccttttctgcctacagcgcgcagtcgctgcagcacatgcagtacaacgcccagtacagctcggccagcaccccccagtacccgacagcacaccccctggtccaggcccagcagtggacttggtgagcgccgccccaacgagactcgcggccccaggcccaggccccaccccggcggcggtggcggcgaggaggcctcggtccttatggtggttattattattattataattattattatggagtcgagttgactctcggctccactagggaggcgccgggaggttgcctgcgtctccttggagtggcagattccacccacccagctctgcccatgcctctccttctgaaccttgggagagggctgaactctacgccgtgtttacagaatgtttgcgcagcttcgcttctttgcctctccccggggggaccaaaccgtcccagcgttaatgtcgtcacttgaaaacgagaaaaagaccgaccccccacccctgctttcgtgcattttgtaaaatatgtttgtgtgagtagcgatattgtcagccgtcttctaaagcaagtggagaacactttaaaaatacagagaatttcttcctttttttaaaaaaaaataagaaaatgctaaatatttatggccatgtaaacgttctgacaactggtggcagatttcgcttttcgttgtaaatatcggtggtgattgttgccaaaatgaccttcaggaccggcctgtttcccgtctgggtccaactcctttctttgtggcttgtttgggtttgttttttgttttgtttttgtttttgcgttttcccctgctttcttcctttctctttttattttattgtgcaaacatttctcaaatatggaaaagaaaaccctgtaggcagggagccctctgccctgtcctccgggccttcagccccgaacttggagctcagctattcggcgcggttccccaacagcgccgggcgcagaaagctttcgattttttaaataagaattttaataaaaatcctgtgtttaaaaaagaaaaaaaaaaaaaaaaa

SEQ ID NO: 253 - DNA, 1182 bp, Artificial Sequence
  THRSP
attgtgtcagaggaagcaaccatgcaggtgctaaccaagcgttaccccaagaactgcctgctgaccgtcatggaccggtatgcagccgaggtgcacaacatggagcaggtggtgatgatccccagccttctgcgggacgtgcagctgagtgggcctgggggccaggcccaggctgaggcccctgatctctacacctacttcaccatgctcaaggccatctgtgtggatgtggaccatgggctgctgccgcgggaggagtggcaggccaaggtggcaggcagcgaagagaatggaaccgcagagacagaggaagtcgaggacgagagtgcctcaggagagctggacctggaagcccagttccacctgcacttctccagcctccatcacatcctcatgcacctcaccgagaaagcccaggaggtgacaaggaaataccaggaaatgacgggacaagtttggtagaccttggacactagggaagatcccttcacatgatagaagacagactctttgatgaggtcggcggagcagttcactagccaatgatgagagcagaaaggcctagacctgcagccagaagtgaaggcggctcagttctccgggatgcttctctacctcctgagcaccaattcctggattccagtcactggctcacctttagaatgtctgttgctattcactgctcccctcgctcctcttaacagcttggggaggtgaccagtggttcaggagggactagacaattacctgtccagtgtggtatggtaggaagagtgtaggtgttggcacgtgaccaaaattcacatccctcctcatggcagtcattcagtatgtgtacttgtacaagttatttaacccattggagcctaaattccctcatctataaaatggggataatattatctacctcacaagcttatgaaaactaaacatgatgaatcaaaagcacttggcatgtgagggctattaaaatagcctgattttttttttctccccctctccccaatgtatttgctctggcccttgctttttaccctccagagctaagaggtagcagagtctcttgggatgagtgattcaccctcttacttggcgaccactgatgagatcaacaacaggtgaactataaacctattatttattgcagaactaataaaaaatccaaagccttgtatttgtaaa

SEQ ID NO: 254 - DNA, 1077 bp, Artificial Sequence
  H3F3A
gtcagccatctttcaattgtgttcgcagccgccgccgcgccgccgtcgctctccaacgccagcgccgcctctcgctcgccgagctccagccgaaggagaaggggggtaagtaaggaggtctctgtaccatggctcgtacaaagcagactgcccgcaaatcgaccggtggtaaagcacccaggaagcaactggctacaaaagccgctcgcaagagtgcgccctctactggaggggtgaagaaacctcatcgttacaggcctggtactgtggcgctccgtgaaattagacgttatcagaagtccactgaacttctgattcgcaaacttcccttccagcgtctggtgcgagaaattgctcaggactttaaaacagatctgcgcttccagagcgcagctatcggtgctttgcaggaggcaagtgaggcctatctggttggcctttttgaagacaccaacctgtgtgctatccatgccaaacgtgtaacaattatgccaaaagacatccagctagcacgccgcatacgtggagaacgtgcttaagaatccactatgatgggaaacatttcattctcaaaaaaaaaaaaaaaaatttctcttcttcctgttattggtagttctgaacgttagatattttttttccatggggtcaaaaggtacctaagtatatgattgcgagtggaaaaataggggacagaaatcaggtattggcagtttttccattttcatttgtgtgtgaatttttaatataaatgcggagacgtaaagcattaatgcaagttaaaatgtttcagtgaacaagtttcagcggttcaactttataataattataaataaacctgttaaatttttctggacaatgccagcatttggatttttttaaaacaagtaaatttcttattgatggcaactaaatggtgtttgtagcatttttatcatacagtagattccatccattcactatacttttctaactgagttgtcctacatgcaagtacatgtttttaatgttgtctgtcttctgtgctgttcctgtaagtttgctattaaaatacattaaactataaaaaaaaaaaaaaaa

SEQ ID NO: 255 - DNA, 4077 bp, Artificial Sequence
  PCDH8
agcttctgtaagagacggagaggcgcagagtgagggcgggtccgcgcgtcctcagagcccgctggaggctcggagctgctacccgcagacttctcccgcacagggctcgcaaagagcgtgattccgagagcctgagactgacgcccgacctggaaaccagagaagacttccttagcctttcggatcgcacttgaggctggaggcatgagtcctgtgaggcgttggggcagcccctgccttttccccttgcagctcttcagcctctgctgggtgctctcagtggcccagagcaaaacagtccgatacagcaccttcgaggaggatgcccccggcacggtcatcgggaccctggccgaggacctgcatatgaaagtatcgggtgacacaagcttccgcctgatgaagcaattcaacagctctctgctccgggtgcgcgaaggcgacgggcagctgaccgtcggggacgccggcctggaccgcgagcggctgtgtggccaggccccgcagtgcgtgctggccttcgatgtggtcagcttctcgcaggagcagttccggctggtgcacgtggaggtagaggtgagggacgtcaacgaccacgcgccgcgcttccccagggcccagatcccggtagaggtgtccgagggtgcggcagtgggcacgcgcatccccttggaggtgccggtggacgaggacgtgggcgccaacgggctgcagaccgtgcgcctggccgagccgcacagcccctttcgcgtggagctgcagacgcgagcggacggcgctcagtgcgcagacctggtgctgctgcaggagctggaccgcgagagccaggccgcctacagcctggagctggtggcccaggacggcggccgcccgccgcgctccgccacggctgccctcagcgtgcgcgtcctggatgcgaatgaccacagcccggccttcccgcagggcgccgtggccgaagtggagctggcggaagacgcgcccgtgggctccctgcttctcgacctggacgcagccgaccccgacgagggacctaacggcgacgtggtgttcgcatttggcgcccgcaccccgccggaggcgcgccgcctctttcggcttgacccgcgatcaggccgcctcaccctggccgggcccgtggactacgagcgtcaggacacctacgagctggacgtgcgggcgcaggaccgcggacccgggccccgcgctgccacctgcaaggtcatcgtgcgcatccgagacgtcaatgacaacgcacccgacatcgccatcaccccgctggccgccccaggcgcgccggcaacctcacccttcgccgctgccgccgccgccgctgcactcgggggagcggacgctagctcgccggcgggagccgggacgccggaggctggtgccacttcgctggtgccggagggggcggcgcgcgagagcctggtggccctggtcagcacctcggacagggactcgggcgccaacgggcaagtgcgctgcgccctctatgggcacgagcacttccggctgcagccggcctacgcgggcagctacctggtggtgaccgcggcgtcgctggaccgcgaacgcatcgccgagtacaacttgacgctggtggccgaggatcgcggcgcgcccccgctgcgcacagtgcggccctacacggtgcgtgtgggcgacgagaacgacaacgcgccgctcttcacgcggccggtctatgaggtgtcggtgcgcgagaacaacccgccaggcgcctacctggccacggtggccgcccgcgaccgggacctgggccgcaacggccaggtcacctaccggctgctggaggccgaggtgggccgcgccgggggcgccgtgtccacttatgtctcggtggacccagctaccggagccatctacgcgctgcgcagcttcgactatgagacgctgcgccaactcgacgttcgcatccaagctagcgacggcggctcccctcagctttccagcagcgccctagtgcaagtgcgcgtgctggaccagaacgaccatgcgccagtcctggtgcacccggcgccagccaatggctccctagaagtggcggtgcctgggcgcaccgcaaaggacacggttgtggcccgtgtgcaggcccgggatgcagacgagggagccaacggggagctggcgttcgagctgcagcagcaggagccgcgcgaagccttcgccatcggccgccgcacgggggagatactgctcaccggcgacctctcgcaggagccacccggtcgcgtgttcagggcgctcctggtcatatccgacggcggccgtcccccgctcaccaccaccgcaactgtcagcttcgtggtaacagcagggggcgggcgtgggccggctgcgcctgccagtgcaggaagcccggagcgttcccgcccgcctggctctcggctcggggtgtccgggtcggtgctgcaatgggacacgccgctgatcgtcatcatcgtgctggccgggagctgcacgctgctgctggccgccatcatcgccatcgccaccacctgcaaccgccgcaagaaggaggtgcgcaaagggggggccctccgggaagagcggcccggggcggcgggcggcggagcctcggctcccggctccccggaggaggccgcccggggagccgggcccaggcccaacatgttcgacgtgctcaccttccctggcaccggcaaagcgccctttggcagccccgcggcggacgcgcctccgcctgcggtcgccgcggccgaagtgccgggctcagagggcggcagcgccactggggaaagcgcctgtcacttcgaggggcagcagcggctccgcggcgcgcacgccgagccctacggtgcctccccgggttttggaaaggagccggcgccccctgtggcggtgtggaaaggacactccttcaacaccatttctggcagagaagcagagaagttcagcggcaaagacagcggtaaaggggacagtgatttcaacgacagcgattccgacatcagcggggacgctctgaaaaaggatctcatcaaccacatgcagagtggactgtgggcgtgcaccgctgagtgtaagatcctgggccactctgaccgctgctggagcccatcctgcagcgggcccaacgcacatccatcgcctcacccaccagcccagatgtcaaccttctgtaagagcacgtcactgcctcgggatcctctgcgcagggacaattactaccaggcccagctgcccaagacagtggggctgcagagcgtctatgagaaagtactgcacagagactatgacaggacagtcactctgctctcccctccccgtccagggaggctcccagacctgcaggagattggagtacccctctaccagtcccctcctggcaggtacctgtccccgaagaagggagccaatgaaaatgtgtaatcccatgctgcatgtcttcacacatatacaggtcactccgagaagcccctaagttattgaccggtttcagtgttgtatatataaatatgcaagatgtgccttacaatgaagttgttggaagctatttccaatcacattggtactgtttggtatttgcaaacaaaaatgtagttaatgtaatttttatgaaatgtgtgcagtatttaatttttcttatgctattgactttgatttcaattgcggcttgccattttcttagtgtttttaacctgtacattgtgtaatgtaatgtttgtatataatgaaattttgttatatttttatataataaaagctaaagtggaagttattgccaaaggaactgtctgtaagacaaaaaacaaaacatgttggaattacttaattgaaatttatctttcacctgaaacaacctagtgtttgagaaattttgccttgccaagtataacttgtatatcttgactctgtggtagatttcaagttcaatgttatttaattacatttggttttccgtaaaccgtgtcacttataagcacagtaataaaagatttgtcatgtgtttgaagaaaaaaaaaaaaaaaaaaaaaaaaaaaaaaaaaaaaaaaaaaaaaaaaaaaaaaaaaaaaaaaaaaaaaaaaaaaa

SEQ ID NO: 256 - DNA, 598 bp, Artificial Sequence
  FABP1
ctgacctctggccgctattcgaagggaagggagccccctataaaacagcctacagtggacagtctggtcggcagagccgcaggtcagtcgtgaagagggagctctattgccaccatgagtttctccggcaagtaccaactgcagagccaggaaaactttgaagccttcatgaaggcaatcggtctgccggaagagctcatccagaaggggaaggatatcaagggggtgtcggaaatcgtgcagaatgggaagcacttcaagttcaccatcaccgctgggtccaaagtgatccaaaacgaattcacggtgggggaggaatgtgagctggagacaatgacaggggagaaagtcaagacagtggttcagttggaaggtgacaataaactggtgacaactttcaaaaacatcaagtctgtgaccgaactcaacggcgacataatcaccaataccatgacattgggtgacattgtcttcaagagaatcagcaagagaatttaaacaagtctgcatttcatattattttagtgtgtaaaattaatgtaataaagtgaactttgttttaaaaaaaaaaaaaaaaaaaaaaaaaaaaaaaaaaaaa

SEQ ID NO: 257 - DNA, 2520 bp, Artificial Sequence
  SOX2
ggatggttgtctattaacttgttcaaaaaagtatcaggagttgtcaaggcagagaagagagtgtttgcaaaagggggaaagtagtttgctgcctctttaagactaggactgagagaaagaagaggagagagaaagaaagggagagaagtttgagccccaggcttaagcctttccaaaaaataataataacaatcatcggcggcggcaggatcggccagaggaggagggaagcgctttttttgatcctgattccagtttgcctctctctttttttcccccaaattattcttcgcctgattttcctcgcggagccctgcgctcccgacacccccgcccgcctcccctcctcctctccccccgcccgcgggccccccaaagtcccggccgggccgagggtcggcggccgccggcgggccgggcccgcgcacagcgcccgcatgtacaacatgatggagacggagctgaagccgccgggcccgcagcaaacttcggggggcggcggcggcaactccaccgcggcggcggccggcggcaaccagaaaaacagcccggaccgcgtcaagcggcccatgaatgccttcatggtgtggtcccgcgggcagcggcgcaagatggcccaggagaaccccaagatgcacaactcggagatcagcaagcgcctgggcgccgagtggaaacttttgtcggagacggagaagcggccgttcatcgacgaggctaagcggctgcgagcgctgcacatgaaggagcacccggattataaataccggccccggcggaaaaccaagacgctcatgaagaaggataagtacacgctgcccggcgggctgctggcccccggcggcaatagcatggcgagcggggtcggggtgggcgccggcctgggcgcgggcgtgaaccagcgcatggacagttacgcgcacatgaacggctggagcaacggcagctacagcatgatgcaggaccagctgggctacccgcagcacccgggcctcaatgcgcacggcgcagcgcagatgcagcccatgcaccgctacgacgtgagcgccctgcagtacaactccatgaccagctcgcagacctacatgaacggctcgcccacctacagcatgtcctactcgcagcagggcacccctggcatggctcttggctccatgggttcggtggtcaagtccgaggccagctccagcccccctgtggttacctcttcctcccactccagggcgccctgccaggccggggacctccgggacatgatcagcatgtatctccccggcgccgaggtgccggaacccgccgcccccagcagacttcacatgtcccagcactaccagagcggcccggtgcccggcacggccattaacggcacactgcccctctcacacatgtgagggccggacagcgaactggaggggggagaaattttcaaagaaaaacgagggaaatgggaggggtgcaaaagaggagagtaagaaacagcatggagaaaacccggtacgctcaaaaagaaaaaggaaaaaaaaaaatcccatcacccacagcaaatgacagctgcaaaagagaacaccaatcccatccacactcacgcaaaaaccgcgatgccgacaagaaaacttttatgagagagatcctggacttctttttgggggactatttttgtacagagaaaacctggggagggtggggagggcgggggaatggaccttgtatagatctggaggaaagaaagctacgaaaaactttttaaaagttctagtggtacggtaggagctttgcaggaagtttgcaaaagtctttaccaataatatttagagctagtctccaagcgacgaaaaaaatgttttaatatttgcaagcaacttttgtacagtatttatcgagataaacatggcaatcaaaatgtccattgtttataagctgagaatttgccaatatttttcaaggagaggcttcttgctgaattttgattctgcagctgaaatttaggacagttgcaaacgtgaaaagaagaaaattattcaaatttggacattttaattgtttaaaaattgtacaaaaggaaaaaattagaataagtactggcgaaccatctctgtggtcttgtttaaaaagggcaaaagttttagactgtactaaattttataacttactgttaaaagcaaaaatggccatgcaggttgacaccgttggtaatttataatagcttttgttcgatcccaactttccattttgttcagataaaaaaaaccatgaaattactgtgtttgaaatattttcttatggtttgtaatatttctgtaaatttattgtgatattttaaggttttcccccctttattttccgtagttgtattttaaaagattcggctctgtattatttgaatcagtctgccgagaatccatgtatatatttgaactaatatcatccttataacaggtacattttcaacttaagtttttactccattatgcacagtttgagataaataaatttttgaaatatggacactgaaaaaaaaaa

SEQ ID NO: 258 - DNA, 503 bp, Artificial Sequence
  MSMB
gtacctgtctataaggagtcctgcttatcacaatgaatgttctcctgggcagcgttgtgatctttgccaccttcgtgactttatgcaatgcatcatgctatttcatacctaatgagggagttccaggagattcaaccaggaaatgcatggatctcaaaggaaacaaacacccaataaactcggagtggcagactgacaactgtgagacatgcacttgctacgaaacagaaatttcatgttgcacccttgtttctacacctgtgggttatgacaaagacaactgccaaagaatcttcaagaaggaggactgcaagtatatcgtggtggagaagaaggacccaaaaaagacctgttctgtcagtgaatggataatctaatgtgcttctagtaggcacagggctcccaggccaggcctcattctcctctggcctctaatagtcaatgattgtgtagccatgcctatcagtaaaaagatttttgagcaaacacttgaaaaaaaaaaa

SEQ ID NO: 259 - DNA, 934 bp, Artificial Sequence
  CSH1
atgcataaatgtacacagaaacaggtggggtcaagcagggagagagaactggccagggtataaaaagggcccacaagagaccggctctaggatcccaaggcccaactccccgaaccactcagggtcctgtggacagctcacctagtggcaatggctccaggctcccggacgtccctgctcctggcttttgccctgctctgcctgccctggcttcaagaggctggtgccgtccaaaccgttcccttatccaggctttttgaccacgctatgctccaagcccatcgcgcgcaccagctggccattgacacctaccaggagtttgaagaaacctatatcccaaaggaccagaagtattcattcctgcatgactcccagacctccttctgcttctcagactctattccgacaccctccaacatggaggaaacgcaacagaaatccaatctagagctgctccgcatctccctgctgctcatcgagtcgtggctggagcccgtgcggttcctcaggagtatgttcgccaacaacctggtgtatgacacctcggacagcgatgactatcacctcctaaaggacctagaggaaggcatccaaacgctgatggggaggctggaagacggcagccgccggactgggcagatcctcaagcagacctacagcaagtttgacacaaactcgcacaaccatgacgcactgctcaagaactacgggctgctctactgcttcaggaaggacatggacaaggtcgagacattcctgcgcatggtgcagtgccgctctgtggagggcagctgtggcttctaggtgcccgagtagcatcctgtgacccctccccagtgcctctcctggccctgaaggtgccactccagtgcccaccagccttgtcctaataaaattaagttgtatcatttcatctgaaaaaaaaaaaaaaaaa

SEQ ID NO: 260 - DNA, 14110 bp, Artificial Sequence
  STRN
gcggccgccatggacgagcaggcgggtcccggcgtcttcttcagcaacaaccacccgggcgccggcggtgccaaggggctcgggcctctggcggaggctgccgcggccggcgacggggcggctgcggcgggggcggcccgagcccagtacagtctcccggggatcctgcacttcctgcagcacgagtgggcccgcttcgaggtggagagagcccagtgggaggtggagcgggcggagctgcaggcccagattgccttcctgcagggagaaaggaagggccaagaaaatttgaagaaggatcttgtgaggaggatcaaaatgttggagtatgctcttaaacaggaaagagccaaataccacaagttgaaatacgggacagaattgaatcagggagatatgaagcctccaagctatgattctgatgaaggtaatgaaacagaagtgcagccacaacaaaacagccagttaatgtggaaacaaggtcgacaactactcagacagtatctacaggaggtgggttatacagatactattctagatgtgaaatctaaacgagtgcgagctttgttgggcttttcaagtgatgtcacggacagggaagatgacaaaaatcaggactcagttgtaaatggcacagaggctgaagttaaagagacagcaatgattgcaaaatctgagttaacagattctgcctccgtgctggataatttcaaattccttgaaagtgcagctgcagatttcagtgatgaagatgaagatgatgatgttgatggaagagagaaaagcgtcattgatacttcaacaattgttaggaaaaaagcattgcctgacagcggtgaagatcgagatacaaaagaagctctaaaggagtttgacttcttggttacatcagaggaaggagacaatgaatctagaagtgcaggcgatggaacagactgggaaaaggaagaccagtgtctcatgcctgaagcctggaatgtggaccagggagtaattaccaaactcaaggaacaatacaaaaaggagagaaaggggaaaaagggggtgaagaggcccaataggtcaaaactacaagatatgcttgctaatttgagagatgttgatgaacttccttcattgcagccatctgtgggttcaccttccagacccagcagctccaggcttcctgaacatgaaattaatagggcagatgaagtggaagcattgacatttcctccttcttctggaaagtcattcatcatgggagcagatgaagcccttgaaagtgaactgggacttggagaactagcaggccttacggtggccaatgaagcagactcactaacttatgatatagcaaacaataaagatgcattgaggaagacatggaaccctaagtttacattgagaagtcactttgatggcatccgagcccttgctttccatcccattgagcctgttttgataacagcatcagaggatcacacattaaaaatgtggaatttacagaaaacagccccagccaaaaagagcacttctcttgatgtagaacctatctatacattcagagcccataaaggtccagtgctttgtgtggtaatgagcagcaatggtgagcagtgttacagtggtggtactgatggactgatccagggctggaataccactaatcccaacatcgacccctatgattcttatgatccttctgttttacgaggccctctgctaggccacacggatgcagtctggggtttggcttatagtgcagcacatcagcgtttgttgtcctgttcagcagatggcactctgcgtttatggaatacaactgaggttgctccagcactaagtgtatttaatgatactaaagaactgggaatccctgcctctgtggatctagtgagcagtgacccgagccatatggtagcatcattcagcaagggatatacaagcatttttaacatggaaacacaacaacgcattctcactttagaatccaatgtagatacaacagccaactcttcctgccaaataaatagagtcatcagtcatcctactcttccgatcagcatcactgctcatgaagacaggcacatcaaattctatgataacaatacaggcaaactgatccactcgatggtagcccacctagaagctgttacaagtttagcagttgatcccaatggcctttacttgatgtctggcagtcatgactgttcaatacgtttatggaatctagaaagtaagacgtgtatccaagaattcacagctcatcgaaaaaagtttgaagaatcgattcatgatgtagctttccacccatccaaatgctatatagccagtgctggagctgacgcactggctaaagtctttgtatgacgcaatgcatcatcttcaccttctagctgtttataagtaatcaactgcacacaagagatacagaagacgagggcaagaatcatctcgtcctgcccttttgttctgctgaaggagcacagagaacatttgttgaagtatagttttgcaattcatatactgttttctaaaactaaggtttgttcaggttgctgcaagctcagctgaatctgtgagcctgaggtctgtttcaaatttctccccaataggcgcctttatttctgaggtggttctaattcgctaggcaggcctgagcgaatacaagtttagcttgtccctgttgagtaagtagggcatgctacaatggataatttaaaagcttgatagctgggactgaatagaagaaaacgggaaacttagaccaagttctcccctgagaaatcttgttaaaacacattaagtagtcaaaatagtaatctttatcatatctgccatattaacccctttgtgtataatgaccaggcagtgttaaactgagtttttaatttgactctcctttcagctgttcacataaagcacctggcaaagcattttacctgttagggggagaaaaatgcaataatatgttaaatatattattattcagaaatgctagacaaatagtttgcaagcagatttctatattgtattacagttttgaaaacagatttggtatcattctaaagtttagctatcaagcactcaccattgtgaagaatagttgatcgactctgcttttactaacagatttaacttattcaggtttgaaattctgtttatttttaagggtaaacagggcatatctctttaataatttctattttaaaattcactttattcatgtgacatttatagtaccagagtgattatttcataccaatgaaatcttacttttcagtgactgaaaagatagaatttatttgctaataatcatttatcaacacccacctaatcatgcttcagatgatctgtgctctttcttctttgtcacgttcaagttatctgacatctaccaagaacagttcataattattaatagcccaaagagtatggttaacttcacgcagctgcttttgcagaagcactaataaaaacaaatattttgtaccctagaagtcctctattaatccctgtaagaatctcctggaaacctggatgaaagagtttaatgccaaatattggctaaaaagttctgtctttctctctccctattcctcccccattgtttaattgagatatacatgttttaatgggcagtggatcagtattgtttctggggaaatccacaccttaaaaggccaggcttccccagcccaacttacctgtgacccacctacatgtgttcaccttttgggattctgaagaccctgctatctagacctagtctcctgtcataaagacattatttctatagtggtttatgtctctcttactctttgtcccaaatgacagagaccaatctagaaattggaaataaattattaacgtccaactttccaccaaaaaacatataaataggctcttagattttaaaaatattaaatctatagatattttaaccaattaaaacaatttctacatattccattccccacattttccatcgtcataacaatgatgcttctcatgatacgtacatctactccttgaaaaagtattctggtggtggtgtggctaatgattgacaaatatttctgtaaaatttctgcctgtttgcctctagaattctgcattatacaggcaaattttctttaaagctagagacttgtgctaaatttgcctgattttcatacagatatgctgtagtaatacagctaccttttcatttcatctttgtgctttggttaacaagcaggctcaagagactgctttgtgtaattaaatgaattgacctaaacatgagctgtcaggtgaatacttaatatttccatgcagatacagaattccatattgtgttcagtaaatttcttttggttcttcacagtgaagaaagaatgtttctaacctaacatttgtagaaggatactggaaaattccttccaggaaggaaggaaggaagatgccattacttggtgtatttatgatggatgaccacaaagctattgttctaccagttattaattaccttctaagatcttcagttactgctttattaatgtcactgaaattctaaaaaccaggacattcttcccccgttcattttatgcttcatggttgaaatttttctgtcagtgagtggaaaataaccatgagatacatagactgtagcgcaaatggaactgttgaaagttccttagaaagccagtgctgtggcattggagactacggagagagtcttctctaccagcactgcatgatctcagcctagaaatgagccaaagctgtcttccaaccagagtagcatatacatgtgtctgacttttcccctagcctgttgaacattcaatgaaaattcacagaatgaacaaattcaatgtttaaacagccattgaaatgctttcatagtgcttcatttgtaaatattttgtttgaaatgtattggaatagtatgaaaattagcgggaggtttggatccctgccttattttcatatgctgtggatacatctctgggagcttgcagcacccttctcaaaactcaactgtcatatggagctcatttgctactcaaaccatagacagattatttaacaaaagtgatataatgaccttcagtatttttctattgaacaagtttaacaacttttgccattaaacaaatacttagttatgcaaaatatttcgcttttataatcattttagttatgactaaaacgggggaaattgagctgcatcactgatgatgaactttgtgagaaattttttttttaatctgactttcattccttcagtattcttgctataaatttcttttggagataatgatgaagatttatttgaaaatgtctaaaatgtatgtatattttataaatatatattatatatattgtaagaatatatataatatataaactatatatatatatatatatatatatatatatatatatatataaaccataggtgcattttactgttttgtattttcatttttggaggtagtatacacagcagataatgatgagtatgatgagtgttgtgctgtttgcttttgcagtataatatatagttctaagtgtttaaattactgtatatacaatattcattataggctagcatgcttgttttaaagactgtcattctagtgtattaaaatctgaatgtaagaaaacctggctattcaaatgtgaattgaaaaatattttattctcagtactgaactatttccattgaacattcagactttttaacaaaaacaaatatcatcaagaaggcaatagctagaaaatgagaggtgcctttaaaaaaaaaaatgcagccttacagtgaggatgaagattgagtttggggagggggtgggagggggggcacagagagagagagagagttagtgtgtgtgtgtgtgtgtgtgtgtgtgtgtgtgtgtgcatgcatgcgtgtgtgtgtgtgtgtgtgtgtttaccaatctgtgaaggtcctgatttgtgaccatcaatgtctttttaatgtatctgctcaacttctaggacttcaggggacatttcatgcgctttgtgctcttctgagcaccatatatactttccaagaattttgaatgtgaattcctagaaatttcagtagagaaaacaatagctattctttaattatagtaaagttcaggtagaaggagaaattatttgttcaccaaaattatgggatctcattaatgttggctaagtaaatgtaattttttaaaggctcactttttaatacttcatatatttccctcttacaaaacagcatgtcatgaagttcttatgtggtaaagattcaactagtaaatatttttaggttaaatacctgaactagttaaaattccacctaagaatagtcttaaaatatttaaaaagcatctctcatatctacctctttgtcattgctgccattttaactgaagcaaatctttatgacatctgaaatgatggttggatgcaattaaaaaaaaatctatgttggtgcttttctcaggctttgtcatttaagttatattgtattaagatgtcacaaatcagactgaaaggcttagaattaattttgtttttctttgaaagaattgcttaaaattaaccatcaatgtttttagcgagtggagataatgaatctttggttggtgtctgtctgtgtgatgttttcaaccaatagccaaataattattgaacttacatgaaaaagagtgctaagtataattttatttagattactttattctttgaaagtgactacaaggctattaagtacataatcattcattttatttactcagaagttgcctctccattactgttaacttgtttagtaatttatataattgcagtacttttaagtgttggacactgggattcaggttgtatacaaagtagtagctgacgaaaaatatgtatatttttgtgaaatgtatcaagccctaaagttcattttagagaaaggcccagaaaaacgtatctgtgtttaaaaacaaaggacaggtcattcgtcaatttgaatcatttttacttttgccactacaaactttttaattggcaatatccatcatccaactggatcttcatgtcagtgtcagggatgccaggttgacaaagtatttaacagatcctttcagtttttgttttgtttttttaattctaaaaaaaacaaatgttaggccaaacagatccctagatcccactcattgattctggcggtattcctaaagtggtgcttagggggtcagaattttctggatctttgctaatccaagctttagatttaatttaaccaggaccacatgcttgtcatctctctgatgcaaattttcaaaatcattttaatttagattctaatgtctgcctgggtttttaacaggctgtgaaccagtgagtgccttgttaatgtagaatgatttttcccccctgggtgggtgttagttagctcctctctgaaaatgtctcagagaatggtattttaattgacttgtagagagctgctaaatttgttattatcagcaatcagaaagtctttggtctaccacacatctccctccctactatctcttcattgtttggctgaagtttgcctcttgtgagaaaacaatacaactccccttctccacacactttttttccagcccagattaataggtatcccctaccctaatcccaactctatgatctaataccttttttaggaggaaccacttctttttaatattgaaatctgctggttactttatgttttctcaagttcagttgactagagctgaccacagggtgtcatcaattcagattcctaaataaccctttctctccacacccagtcctccagctggtgagccctgggccagattgtttgatcttcaggtattttaaattttagttacatcaattaatgtaaattaatccaaatgctaatttttgtggtgcaagaagtttcttatgtaaattcagggtatggataagctaattaagatatccatctttggtggctctaagtgtattatttgtttttaaataaagtgtacaaatatagataacatgctataggtgtctcatgaattggaatatttgtcagatttgggatctagctgtggctttacagtaatcagttaaattaacatagtctgatttggggcttttgggggaggagttgtagaggggtgcagagaaataaaaggatattagacaaagtatacatgagtccaaaattaatgaaccagtcttaattactgattgtgaggaaggagaagtttatagagaatttgggcctctgaaaagccaaattaaaatagcttctaggattgggtcagtggtactttcagagacacatatgtttaatgaataggttttatgtttttcaaatgttcagtttaaatggcttttaaaatttatacacatatataaatacaatgtttttattttttgtttcgctacttaacagacatacacaagccttccacactccctgccccttcaaatcaacattatttttcaaggcctttggcctgcccagaactcacagtctttttgttccaatcaggatccacaatacaatatgaaatttaaaaggcatctcttctgatatccttgaaactatccaccattgtttggtgttctgtatgctggtatactaatgagtattatatcctttggtatgtacacacattttcagtagtgttggaaacacctcttttatctttttaatgagaactgagacatgattagcttgagtaattttggagatctatctcaggaggtcattaaaactccaaaaattattcacggattgatgaacctcctggggtcagcctaagattgccaggtagtattctgacctcctctgggtttcccaagatcactgatgttttgcagggccccagcattgtcctggcacataaaatattcccagaacaccttgggagtcaagcataccttttaacctaaacattataatcatggagcatccctccgcctgttacttctcaggatgaccagaacactccagttctctaaggaagcactgacatacggctctgaaaattggaatccgttttctgaaacacaaattttaactcagtaagttttgtatatcaaatgattcaaaacccaccaaacataaaatgactcgcttctaagtatcactcaaaccctacaaaacctaaccctttccttattcctaattgatatttcactaaaggtaatggtagtttcagttagattggaagtcattatttgggtgagcaaagtctgcaataacctactgataggaaggacctatttcatagaaaagtatcttgtccttggtgatttagccattcaccttacgtgaagagtggtccagatgccagctccacattgactttttctgtgtccctctttaggtaattaacccagtgatgtaaaggagagcccacagtaaaacatctgttaaacagcacttggagtactatagtgttattaatttatgtgctataatttcttatgccatcataaaatctagtgtatgtaccaggttcccaattcattgcctcaaacaaaagatttttaaaaattctaatagcatcaaattaagggtaatggtagggaaacccatcatccacaattaaatatgcccaaactgaaaactttaagaaaaaaaagcacatggaaagcaacgttttacattaatcgtgagttgtagaaataaacagcttgtggtttgtatatgtgccgaaatgttaaagtatgctggcatccaactacttccctttggaaatgggaccaagacaataatttttcatgcataaacaaaattaacttagagcaaaagtaattttatcagaaacagtttattttgggggctggataacttgggtgagagtgtggggaaagaagtaccttaccaaaaaggagaagcaactgaccctgtggcctgagccacattgtcttccatttcaacttcaatgggctggcagtataccacttctgacctcaaagaatgaatggttccaattctggcttgtcattggtccttgttatctaaattaaatatttttaggaaatatatcaaaagtatcctagagccccatggcaaagtgtcagaggaaatagttttcattatattttaggaagctgtaaaaatataagcccaagtattttgtgtcatctgcatatgtcaggatgaagaccaggcatgtaagaaatatcctaaagtagccaagtgataatctcatgaaaaaatatgagaatcgtttttacagagtgagttctcttttgaatggttttgactatgcttttaaaaacatttttaaaatgtacttacatctttttcgatagcccacgtatttcagaatatcctcttgatagaataatatcactcagtgtgatttttagaaaaagaaaaactcggtggtctcatatcttttgacagttgtttgtgaataataccctccccaacaaccttcccagtactcaactgctatgtaagaatgctttcttatgtggtaaatgtctcagtattttgctgcctggtatttgttcagtttccttgtatatctcagggtcagaaggaatcaggctttctcccaactctgaaacattcagacttactttctttttggtcagccttttaacaagcaagacaataaactccttttgtcagaatcgatttgattaaaaaaaaaaaaaaagaatgtgctccttatttctcattgctgtagaatacgtaggaatacacatctactaatcacaattaaaaaataagagaatctttagaaacatcattgctttctggaggtagaaattttgaacttgaaggttgtagttccaggcaattttgtgcccttgaggtgtccaattgatagtatagcttgcctctgctaataaatacacaaaagttttctttcctgtgattttcagaaattatttttggaatacaaagattaataaggaatatgtgatgtttatctcctgcatttcaaaatcttctggattttttttgaggcatgaggagcaggtaatgagattttttttctgaatatcttgattctctcccttaacccagattttgcatattatgcattgctcatttgtcacctacaaaaataaaggttaatgattatttgtttgcttttgtctatataagctccctaaggcacagaccatgttcgtttttcttatgttcctcttagcactgtgcctggtgccttgccatataaaaggtaccctataaatatttgttggctgagtaatcagagagcccatttcaaaatctaaattatacaaatcatcaaagaccaaaaaaaaaaaaaaaaaatctcttgacagttgatgctcaaatgcatttggttctgtggagcttatcctgagattgaggtctgcaccttgactggagaggaatttggactttacctcacaggtagcaacaaaatgcctgagtagcaacgtctttatactgcacagttccagtcctgcctgcgtgaaaactgagcagagcatggtggggacaggaaggtgtccctaaaccctgttgatgacctcccatctatccccggacccccatatctcctctgctcatcccctgttccccactggcctctgatcagttgaaagggagcttttctagcctggaacctgagcctgccttgattatcctgggctcagaacaggtccacttccacactctttccttgcaacctacagatggccctactgactgctgttgtccaggagaaagacgaacctcccagtggaatcttgtcaggaaaggcatccctctggggagctttctttggagaggaaaattctgggacaaagttcctcaggatgctctcaggctggtttttgtcttgaagattttatagtaattgtaccaatgtttattaactctcctaggaacatctctgtctttggttttctgacagcactccagcagggcccagggctttagctgaacagtgcaattgttttaggaataaaacagtcaacaagttagagaccaactatttatatttaatattcaaatgactttaaatcattaaaagaatcagcaaattacatatgaaatattcaacgaataatctcaacattaaacatataccatgtaagaactgtcattaaaattactaaaaatatgattcctttaagatcagttcaacacagaagaaagcaggaatttggcctggacaataggacatttattgtctgttagattttagacaagtcaactcttctaaattggcttctcatctatgaaatggggataatagatctgcctaattaggttgatttgagataacggatgtaaaacacctaataaaataagcatccagcaaatgacttgttcactctctgaatacagacttctggtcatgtagttcggtcacactcctgatagcttctagaacatcagggttttaggagaaataggttaaaatgaacatcaagagtagcagaagactactttccttaatatttgagtgccagctatatgccacacagttctagttgctggcagtcagcagtaaacaaaaacttcacctgatgcagcacattccaggtgggggaacaagtgaaaatatagggaatattagtgataagtgcagagggaaaaaaaatagagcagggaagggggatgatttgatgtttttcaggttaagaaagtgacagaaatgaatttaaatgcaaaaaacaatgcataaagattcataatggcaaaacgaagcatgtcccatcataccccttcattcctacctccctgatatgtatctttctaattattcatacaaatgtgtatacccagttattacatatggggttttattctacatattatgctgcacttgctttttctaatataatgtgtatcatgagcaccttacaaatttttaaaggtctctcaaatttatcagtaaacatatacagtctaacgttaatgagaagatattttggtgggcagtttgctttaaataaatgggatcatgtacgttctctgcatctcacatttctcatttaacaatgtaggatgagaatttctctaagtctatcatagctcttatttcctttttattattacaataaacattcctgtgtatatgtttgtcaccatgatggttttacgtctgcggaatagattccctggagtaggattgctgcattgaggagtatgtatatttaaatttttaaataaatattgacagattgtttcccaaagtggccggaacagtttttatttccatcagtaaatgtataaaaacacttttcccttaatactcatggcaataactattgtaacattaaaaaatacgtagaaaaaagaaaaaaatcctggtggatgtagtgatttttcagtgttattttaatttccattttcctgactactataaatgtagacatcttttcaaatgttttggtcatctggattgcactcagaactgaattatctattcaaagttctgtaggttagaactccagggaaactcaactgggctgtctgttcaaggcccaacaaggctgaaatgaaagtgtcttccagggtgggtactcaactaaagctctgaggaggaattcgcttccagcctcattaaagtcagaggatggaggtccctgtctcctagctgactgtcaaatctgatcctttagaggttgctccgtggtccttgcacgtggtcccttccaccttcaaagcttgccagggtgcatcaaattatttttatactttgactctacttctaccagccagagaaaactgcttttaaagggctcttgtgactagtttaagcacacccagattgttaaggtcaactgattagtagctttaattacatctgccaagtccctctgccctgcaatgtaacatcaaccatggaagtaacatgaggggcagagttcatgggggccatcttagaattctgcctaccacaaatattcgtagttatacttttatatacatttttaaatttttcttatttttggtccatatgtttgtaccgtttgtctttttagttaactagtttgtgaaagcattttgtatgttgtacaatatatgttcagattttcttatcttggatgcaaacatttttttccaactcttgtaagttgtctgttgaccacattcaaaagtactttttccaaataaaactttgccttttgaatttca

SEQ ID NO: 261 - DNA, 2022 bp, Artificial Sequence
  EEF1A2
gccccgcccccgcccgcggcgcgtttctcccccgcctcccgcgtccgtctttgcagcccgcgcctcccgcatcgcctcgcgtccccgtggcgcccgcccgcgcgcgtccgcgccccgccccctcccgcgcggttccgcattggcgtgctgcagggcgcggtgcactgcgccgccaccgtcaataggtggaccccctcccggagataaaaccgccggcgccggcgccgccagtccctctggctgagacctcggctccggaatcactgcagcccccctcgccctgagccagagcaccccgggtcccgccagcccctcacactcccagcaaaatgggcaaggagaagacccacatcaacatcgtggtcatcggccacgtggactccggaaagtccaccaccacgggccacctcatctacaaatgcggaggtattgacaaaaggaccattgagaagttcgagaaggaggcggctgagatggggaagggatccttcaagtatgcctgggtgctggacaagctgaaggcggagcgtgagcgcggcatcaccatcgacatctccctctggaagttcgagaccaccaagtactacatcaccatcatcgatgcccccggccaccgcgacttcatcaagaacatgatcacgggtacatcccaggcggactgcgcagtgctgatcgtggcggcgggcgtgggcgagttcgaggcgggcatctccaagaatgggcagacgcgggagcatgccctgctggcctacacgctgggtgtgaagcagctcatcgtgggcgtgaacaaaatggactccacagagccggcctacagcgagaagcgctacgacgagatcgtcaaggaagtcagcgcctacatcaagaagatcggctacaacccggccaccgtgccctttgtgcccatctccggctggcacggtgacaacatgctggagccctcccccaacatgccgtggttcaagggctggaaggtggagcgtaaggagggcaacgcaagcggcgtgtccctgctggaggccctggacaccatcctgccccccacgcgccccacggacaagcccctgcgcctgccgctgcaggacgtgtacaagattggcggcattggcacggtgcccgtgggccgggtggagaccggcatcctgcggccgggcatggtggtgacctttgcgccagtgaacatcaccactgaggtgaagtcagtggagatgcaccacgaggctctgagcgaagctctgcccggcgacaacgtcggcttcaatgtgaagaacgtgtcggtgaaggacatccggcggggcaacgtgtgtggggacagcaagtctgacccgccgcaggaggctgctcagttcacctcccaggtcatcatcctgaaccacccggggcagattagcgccggctactccccggtcatcgactgccacacagcccacatcgcctgcaagtttgcggagctgaaggagaagattgaccggcgctctggcaagaagctggaggacaaccccaagtccctgaagtctggagacgcggccatcgtggagatggtgccgggaaagcccatgtgtgtggagagcttctcccagtacccgcctctcggccgcttcgccgtgcgcgacatgaggcagacggtggccgtaggcgtcatcaagaacgtggagaagaagagcggcggcgccggcaaggtcaccaagtcggcgcagaaggcgcagaaggcgggcaagtgaagcgcgggcgcccgcggcgcgaccctccccggcggcgccgcgctccgaaccccggcccggcccccgccccgcccccgccccgcgcgccgctccggcgccccgcacccccgccaggcgcatgtctgcacctccgcttgccagaggccctcggtcagcgactggatgctcgccatcaaggtccagtggaagttcttcaagaggaaaggcgcccccgccccaggcttccgcgcccagcgctcgccacgctcagtgcccgttttaccaataaactgagcgaccccagaaaaaaaaaaaaaaaaaa

SEQ ID NO: 262 - DNA, 1666 bp, Artificial Sequence
  CKM
gctcagctgccctccagaactcctccctggggacaacccctcccagccaatagcacagcctaggtccccctatataaggccacggctgctggcccttcctttgggtcagtgtcacctccaggatacagacagccccccttcagcccagcccagccaggtctcctacaccgccaccatgccattcggtaacacccacaacaagttcaagctgaattacaagcctgaggaggagtaccccgacctcagcaaacataacaaccacatggccaaggtactgacccttgaactctacaagaagctgcgggacaaggagactccatctggcttcactgtagacgatgtcatccagacaggagtggacaacccaggtcaccccttcatcatgaccgtgggctgcgtggctggtgatgaggagtcctacgaagttttcaaggaactctttgaccccatcatctcggatcgccacgggggctacaaacccactgacaagcacaagactgacctcaaccatgaaaacctcaagggtggagacgacctggaccctaactacgtgctcagcagccgcgtccgcactggccgcagcatcaagggctacacgttgcccccacactgctcccgtggcgagcgccgggcggtggagaagctctctgtggaagctctcaacagcctgacgggcgagttcaaagggaagtactaccctctgaagagcatgacggagaaggagcagcagcagctcatcgatgaccacttcctgttcgacaagcccgtgtccccgctgctgctggcctcaggcatggcccgcgactggcccgacgcccgtggcatctggcacaatgacaacaagagcttcctggtgtgggtgaacgaggaggatcacctccgggtcatctccatggagaaggggggcaacatgaaggaggttttccgccgcttctgcgtagggctgcagaagattgaggagatctttaagaaagctggccaccccttcatgtggaaccagcacctgggctacgtgctcacctgcccatccaacctgggcactgggctgcgtggaggcgtgcatgtgaagctggcgcacctgagcaagcaccccaagttcgaggagatcctcacccgcctgcgtctgcagaagaggggtacaggtggcgtggacacagctgccgtgggctcagtatttgacgtgtccaacgctgatcggctgggctcgtccgaagtagaacaggtgcagctggtggtggatggtgtgaagctcatggtggaaatggagaagaagttggagaaaggccagtccattgacgacatgatccccgcccagaagtaggcgcctgcccacctgccaccgactgctggaacccagccagtgggagggcctggcccaccagagtcctgctccctcactcctcgccccgccccctgtcccagagtcccacctgggggctctctccacccttctcagagttccagtttcaaccagagttccaaccaatgggctccatcctctggattctggccaatgaaatatctccctggcagggtcctcttcttttcccagagctccaccccaaccaggagctctagttaatggagagctcccagcacactcggagcttgtgctttgtctccacgcaaagcgataaataaaagcattggtggccttaaaaaaaaa

SEQ ID NO: 263 - DNA, 1294 bp, Artificial Sequence
  GCG
gcatagaatgcagatgagcaaagtgagtgggagagggaagtcatttgtaacaaaaactcattatttacagatgagaaatttatattgtcagcgtaatatctgtgaggctaaacagagctggagagtatataaaagcagtgcgccttggtgcagaagtacagagcttaggacacagagcacatcaaaagttcccaaagagggcttgctctctcttcacctgctctgttctacagcacactaccagaagacagcagaaatgaaaagcatttactttgtggctggattatttgtaatgctggtacaaggcagctggcaacgttcccttcaagacacagaggagaaatccagatcattctcagcttcccaggcagacccactcagtgatcctgatcagatgaacgaggacaagcgccattcacagggcacattcaccagtgactacagcaagtatctggactccaggcgtgcccaagattttgtgcagtggttgatgaataccaagaggaacaggaataacattgccaaacgtcacgatgaatttgagagacatgctgaagggacctttaccagtgatgtaagttcttatttggaaggccaagctgccaaggaattcattgcttggctggtgaaaggccgaggaaggcgagatttcccagaagaggtcgccattgttgaagaacttggccgcagacatgctgatggttctttctctgatgagatgaacaccattcttgataatcttgccgccagggactttataaactggttgattcagaccaaaatcactgacaggaaataactatatcactattcaagatcatcttcacaacatcacctgctagccacgtgggatgtttgaaatgttaagtcctgtaaatttaagaggtgtattctgaggccacattgctttgcatgccaataaataaattttcttttagtgttgtgtagccaaaaattacaaatggaataaagttttatcaaaatattgctaaaatatcagctttaaaatatgaaagtgctagattctgttattttcttcttattttggatgaagtaccccaacctgtttacatttagcgataaaattatttttctatgatataatttgtaaatgtaaattattccgatctgacatatctgcattataataataggagaatagaagaactggtagccacagtggtgaaattggaaagagaactttcttcctgaaacctttgtcttaaaaatactcagctttcaatgtatcaaagatacaattaaataaaattttcaagcttctttaccattgtct

SEQ ID NO: 264 - DNA, 2386 bp, Artificial Sequence
  CEL
ggccacccagaggctgatgctcaccatggggcgcctgcaactggttgtgttgggcctcacctgctgctgggcagtggcgagtgccgcgaagctgggcgccgtgtacacagaaggtgggttcgtggaaggcgtcaataagaagctcggcctcctgggtgactctgtggacatcttcaagggcatccccttcgcagctcccaccaaggccctggaaaatcctcagccacatcctggctggcaagggaccctgaaggccaagaacttcaagaagagatgcctgcaggccaccatcacccaggacagcacctacggggatgaagactgcctgtacctcaacatttgggtgccccagggcaggaagcaagtctcccgggacctgcccgttatgatctggatctatggaggcgccttcctcatggggtccggccatggggccaacttcctcaacaactacctgtatgacggcgaggagatcgccacacgcggaaacgtcatcgtggtcaccttcaactaccgtgtcggcccccttgggttcctcagcactggggacgccaatctgccaggtaactatggccttcgggatcagcacatggccattgcttgggtgaagaggaatatcgcggccttcgggggggaccccaacaacatcacgctcttcggggagtctgctggaggtgccagcgtctctctgcagaccctctccccctacaacaagggcctcatccggcgagccatcagccagagcggcgtggccctgagtccctgggtcatccagaaaaacccactcttctgggccaaaaaggtggctgagaaggtgggttgccctgtgggtgatgccgccaggatggcccagtgtctgaaggttactgatccccgagccctgacgctggcctataaggtgccgctggcaggcctggagtaccccatgctgcactatgtgggcttcgtccctgtcattgatggagacttcatccccgctgacccgatcaacctgtacgccaacgccgccgacatcgactatatagcaggcaccaacaacatggacggccacatcttcgccagcatcgacatgcctgccatcaacaagggcaacaagaaagtcacggaggaggacttctacaagctggtcagtgagttcacaatcaccaaggggctcagaggcgccaagacgacctttgatgtctacaccgagtcctgggcccaggacccatcccaggagaataagaagaagactgtggtggactttgagaccgatgtcctcttcctggtgcccaccgagattgccctagcccagcacagagccaatgccaagagtgccaagacctacgcctacctgttttcccatccctctcggatgcccgtctaccccaaatgggtgggggccgaccatgcagatgacattcagtacgttttcgggaagcccttcgccacccccacgggctaccggccccaagacaggacagtctctaaggccatgatcgcctactggaccaactttgccaaaacaggggaccccaacatgggcgactcggctgtgcccacacactgggaaccctacactacggaaaacagcggctacctggagatcaccaagaagatgggcagcagctccatgaagcggagcctgagaaccaacttcctgcgctactggaccctcacctatctggcgctgcccacagtgaccgaccaggaggccacccctgtgccccccacaggggactccgaggccactcccgtgccccccacgggtgactccgagaccgcccccgtgccgcccacgggtgactccggggccccccccgtgccgcccacgggtgactccggggccccccccgtgccgcccacgggtgactccggggccccccccgtgccgcccacgggtgactccggggccccccccgtgccgcccacgggtgactccggggccccccccgtgccgcccacgggtgactccggggccccccccgtgccgcccacgggtgactccggggccccccccgtgccgcccacgggtgactccggcgccccccccgtgccgcccacgggtgacgccgggcccccccccgtgccgcccacgggtgactccggcgccccccccgtgccgcccacgggtgactccggggccccccccgtgacccccacgggtgactccgagaccgcccccgtgccgcccacgggtgactccggggccccccctgtgccccccacgggtgactctgaggctgcccctgtgccccccacagatgactccaaggaagctcagatgcctgcagtcattaggttttagcgtcccatgagccttggtatcaagaggccacaagagtgggaccccaggggctcccctcccatcttgagctcttcctgaataaagcctcatacccctgtc

SEQ ID NO: 265 - DNA, 2505 bp, Artificial Sequence
  CXCL5
agtggggagagatgagtgtagataaaaggagtgcagaaggcacgaggaagccacagtgctccggatcctccaatcttcgctcctccaatctccgctcctccacccagttcaggaacccgcgaccgctcgcagcgctctcttgaccactatgagcctcctgtccagccgcgcggcccgtgtccccggtccttcgagctccttgtgcgcgctgttggtgctgctgctgctgctgacgcagccagggcccatcgccagcgctggtcctgccgctgctgtgttgagagagctgcgttgcgtttgtttacagaccacgcaaggagttcatcccaaaatgatcagtaatctgcaagtgttcgccataggcccacagtgctccaaggtggaagtggtagcctccctgaagaacgggaaggaaatttgtcttgatccagaagccccttttctaaagaaagtcatccagaaaattttggacggtggaaacaaggaaaactgattaagagaaatgagcacgcatggaaaagtttcccagtcttcagcagagaagttttctggaggtctctgaacccagggaagacaagaaggaaagattttgttgttgtttgtttatttgtttttccagtagttagctttcttcctggattcctcactttgaagagtgtgaggaaaacctatgtttgccgcttaagctttcagctcagctaatgaagtgtttagcatagtacctctgctatttgctgttattttatctgctatgctattgaagttttggcaattgactatagtgtgagccaggaatcactggctgttaatctttcaaagtgtcttgaattgtaggtgactattatatttccaagaaatattccttaagatattaactgagaaggctgtggatttaatgtggaaatgatgtttcataagaattctgttgatggaaatacactgttatcttcacttttataagaaataggaaatattttaatgtttcttggggaatatgttagagaatttccttactcttgattgtgggatactatttaattatttcactttagaaagctgagtgtttcacaccttatctatgtagaatatatttccttattcagaatttctaaaagtttaagttctatgagggctaatatcttatcttcctataattttagacattctttatctttttagtatggcaaactgccatcatttacttttaaactttgattttatatgctatttattaagtattttattaggagtaccataattctggtagctaaatatatattttagatagatgaagaagctagaaaacaggcaaattcctgactgctagtttatatagaaatgtattcttttagtttttaaagtaaaggcaaacttaacaatgacttgtactctgaaagttttggaaacgtattcaaacaatttgaatataaatttatcatttagttataaaaatatatagcgacatcctcgaggccctagcatttctccttggataggggaccagagagagcttggaatgttaaaaacaaaacaaaacaaaaaaaaacaaggagaagttgtccaagggatgtcaattttttatccctctgtatgggttagattttccaaaatcataatttgaagaaggccagcatttatggtagaatatataattatatataaggtggccacgctggggcaagttccctccccactcacagctttggcccctttcacagagtagaacctgggttagaggattgcagaagacgagcggcagcggggagggcagggaagatgcctgtcgggtttttagcacagttcatttcactgggattttgaagcatttctgtctgaatgtaaagcctgttctagtcctggtgggacacactggggttgggggtgggggaagatgcggtaatgaaaccggttagtcagtgttgtcttaatatccttgataatgctgtaaagtttatttttacaaatatttctgtttaagctatttcacctttgtttggaaatccttcccttttaaagagaaaatgtgacacttgtgaaaaggcttgtaggaaagctcctccctttttttctttaaacctttaaatgacaaacctaggtaattaatggttgtgaatttctatttttgctttgtttttaatgaacatttgtctttcagaataggattctgtgataatatttaaatggcaaaaacaaaacataattttgtgcaattaacaaagctactgcaagaaaaataaaacatttcttggtaaaaacgtatgtatttatatattatatatttatatataatatatattatatatttagcattgctgagctttttagatgcctattgtgtatcttttaaaggttttgaccattttgttatgagtaattacatatatattacattcactatattaaaattgtacttttttactatgtgtctcattggttcatagtctttattttgtcctttgaataaacattaaaagatttctaaacttcaaaaaaaaaaaaaaaaaa

SEQ ID NO: 266 - DNA, 5422 bp, Artificial Sequence
  COL15A1
aggttacataaggcagccgcgggtggaggcagcagaggcgagcgcacgtccgtcgagggggaaaggggcgtggggaggcggccggggcggccggtatcccccgggcgtgagtgcgcagcgcgcgggggagcgcagggcgcggcggagtcgggtttcagagcgcgggtgactcggggcgcgggccgggagccgggattctgcccgccgccgccgctgccgagcgccgcctttgttccctgcaggaagggcgagcgcggcggccagcgctcagcgacccttcgtcctccgctaagctccaacgctctgctcgactagccgcgcgccttccggggctccgcagacccgcgagatggcaccaaggaggaacaacgggcagtgctggtgtctgctgatgctgctctcggtctccacgcccctccctgctgtcacccagacccgcggtgcgacagagactgcttcccagggtcacctggacctcacgcagctcatcggtgtcccgctgccctcgtccgtatcctttgtcacaggctatggtggcttcccggcctacagtttcgggcctggtgccaatgttggccgcccagccaggactctcatcccatccaccttcttcagggacttcgccatcagcgtcgtggtgaagcccagcagcacccgtggtggcgtgctcttcgccatcactgacgccttccagaaggtcatctacctgggcctgcggctctcaggtgtggaggacggccaccagcggatcatcctctactacacggagccaggctcccatgtgtcccaagaggctgctgccttctcggtgcctgtgatgacccacaggtggaaccgcttcgccatgattgtccagggtgaggaagtgaccctcctcgtgaactgtgaggagcacagccgcatccccttccagcggtcctcccaggctttggcttttgagtccagcgctggaatcttcatgggcaatgcaggagctacagggctcgagagattcactggctccctccagcagctcaccgtgcaccccgaccccaggactcccgaggagctgtgtgaccctgaagagtcctcggcatctggagagaccagtgggctgcaggaggcagacggagtagctgagatcttagaagccgtcacctacactcaagcctcgcccaaagaagcaaaagttgaacccataaacacacctccaactccatcctccccctttgaagacatggaactttctggtgaacctgtacccgaggggaccctggaaaccaccaacatgagcatcatccagcacagcagccccaaacaagggtctggtgagatcctgaatgacacactggagggggttcattctgtggatggtgaccccattactgacagcggctcaggggctggggccttccttgacattgctgaagaaaagaatttagcagcaacagcagcggggctggccgaggtgcccatcagcactgctggagaagcagaggccagcagtgtgcccaccgggggaccaaccctctctatgtccacggagaacccagaggaaggggtcactccaggtccagataatgaagagcgtttagcagcaacagcagcaggggaggccgaggcactcgccagcatgcctggggaagtggaggccagtggtgtggcccccggggagctggacctctccatgtccgcccagagcctcggggaagaggccactgtgggtccaagcagtgaagacagtttaacaacagctgcagctgcaaccgaagtgtccctcagtacttttgaggatgaggaagccagtggggtccccacagatggcctggctcccctcacagccaccatggcccctgagcgggcagtcacttctggtcctggtgatgaagaagacttggcagcagccacaacagaggagcccctcatcacagctgggggtgaagagtccggcagccctccccctgatgggccaccgctgcccctgcccacagtggctcctgaaagatggatcactccagctcaaagagaacatgtgggaatgaaaggacaggctgggcccaaaggagaaaagggtgatgctggggaggagcttcctggccctcctgaaccttctgggcctgttggacccacggcaggagcagaagcagagggctctggcctaggctggggctcggacgtcggctctggctctggtgacctggtgggcagtgagcagctgctgagaggtcctccaggacccccagggccacctggcttacctgggattccaggaaaaccaggaactgatgttttcatgggaccccctggatctcctggagaggatggacctgctggtgaacctgggcccccgggccctgagggacagcctggagttgatggagccaccggccttcccgggatgaaaggggagaagggagcaagagggcctaatggctcagttggtgaaaagggtgaccctggcaacagaggcttacctggacccccggggaaaaagggacaagctggccctcctggggtcatgggacccccagggcctcctggaccccctgggcccccaggccctggatgcacaatgggacttggattcgaggataccgaaggctctggaagcacccagctattgaatgaacccaaactctccagaccaacggctgcaattggtctcaaaggagagaaaggagaccggggacccaagggagaaagggggatggatggagccagtattgtgggaccccctgggccgagagggccacctgggcacatcaaggtcttgtctaattccttgatcaatatcacccatggattcatgaatttctcggacattcctgagctggtggggcctccggggccggacgggttgcctgggctgccaggatttccaggtcctagaggaccaaaaggtgacactggtttacctggctttccaggactaaaaggagaacagggcgagaagggagagccgggtgccatcctgacagaggacattcctctggaaaggctgatggggaaaaagggtgaacctggaatgcatggagccccaggaccaatggggcccaaaggaccaccaggacataaaggagaatttggccttcccgggcgacctggtcgcccaggactgaatggcctcaagggtaccaaaggagatccaggggtcattatgcagggcccacctggcttacctggccctccaggcccccctgggccacctggagctgtgattaacatcaaaggagccattttcccaatacccgtccgaccacactgcaaaatgccagttgatactgctcatcctgggagtccagagctcatcacttttcacggtgttaaaggagagaaaggatcctggggtcttcctggctcaaagggagaaaaaggcgaccagggagcccagggaccaccaggtcctccacttgatctagcttacctgagacactttctgaacaacttgaagggggagaatggagacaaggggttcaaaggtgaaaaaggagaaaaaggagacattaatggcagcttccttatgtctgggcctccaggcctgcccggaaatccaggcccggctggccaaaaaggggagacagtcgttgggccccaaggacccccaggtgctcctggtctgcctgggccacctggctttggaagacctggtgatcctgggccaccggggcccccggggccaccaggacctccagctatcctgggagcagctgtggcccttccaggtccccctggccctccaggacagccagggcttcccggatccagaaacctggtcacagcattcagcaacatggatgacatgctgcagaaagcgcatttggttatagaaggaacattcatctacctgagggacagcactgagtttttcattcgtgttagagatggctggaaaaaattacagctgggagaactgatccccattcctgccgacagccctccaccccctgcgctttccagcaacccacatcagcttctgcctccaccaaaccctatttcaagtgccaattatgagaagcctgctctgcatttggctgctctgaacatgccattttctggggacattcgagctgattttcagtgcttcaagcaggccagagctgcaggactgttgtccacctaccgagcattcttatcttcccatttgcaagatctgtccaccattgtgaggaaagcagagagatacagccttcccatagtgaacctcaagggccaagtactttttaataattgggactcaattttttctggccacggaggtcagttcaatatgcatattccaatatactcctttgatggtcgagacataatgacagatccttcttggccccagaaagtcatttggcatggctccagcccccatggcgtccgccttgtggataactactgtgaagcatggcgaaccgcggacacagcggtcacgggacttgcctccccgctgagcacggggaagattctggaccagaaagcatacagctgtgctaatcggctaattgtcctatgtatcgaaaacagtttcatgacagacgctaggaagtaatggccttctgatgattcttaaagagttttcaattttttcttatgtgaagagttgacactgaaatctaaaatgtttaattgttgtaaatattacagttttttttttttactacatattctttacaacagcaaccaaagaaaacatacctcaatacactcaaaactgaagacatagaggactcagatcaaagacaaaatctgatccatatattggtgctagattctgcaggaaaccccagcagtgtgaacgcatcccaacataggttaagagcaagttgaaaacaaaggccatggcattctgccactgcatccttcagacagttatatcctccttttaaaccattgttgttgagtgtaagatgtccttcatgttttcttataaagtcagtgtttagaaatgttaccctttctaagttatatacagatcaaatgcttttttctttcacgtacatccatcatttgcaactgctgttcgtacacagaaacaggactgctcaaatgatcctatttgtattttctgatgctatcagactctaatgtttttttccctaaaatattattgccatcatgctttaggaattttatatttttacacaatcatattttagtatggtgtctgtttatgtaactctgacttgctggaaaagttgaaactccaaataatctgaaactagaaaagaaatagcacataattactaccttccccttggcggctctcctccccaacccccaccccacaattttatgacttccatttggcaattgttgaattataactgcgactgaaacaaacaggttcatagagatgaattttctgagaaacatatatctacatgttgtataattggattttttttccatgtaagtgaacataaaaacatcttttccgggtgctttcttcatttga

SEQ ID NO: 267 - DNA, 3231 bp, Artificial Sequence
  YWHAB
gcgcccctcccgtggggccgtggcaaccccgtgcctcgcttgcccaatgagaacacggtttggggcggggcgcggccaggaccggagcggaagtggcgatcggagcggaagtggagctaccgccaccgccgccgccgattccggagccggggtagtcgccgccgccgccgccgctgcagccactgcaggcaccgctgccgccgcctgagtagtgggcttaggaaggaagaggtcatctcgctcggagcttcgctcggaagggtctttgttccctgcagccctcccacggcagagtctccagagatttgggccgctacaaaaagtgcattttgcccattcggctgtggatagagaagcaggaagagcactggacttggagtcagggaatgacaatggataaaagtgagctggtacagaaagccaaactcgctgagcaggctgagcgatatgatgatatggctgcagccatgaaggcagtcacagaacaggggcatgaactctccaacgaagagagaaatctgctctctgttgcctacaagaatgtggtaggcgcccgccgctcttcctggcgtgtcatctccagcattgagcagaaaacagagaggaatgagaagaagcagcagatgggcaaagagtaccgtgagaagatagaggcagaactgcaggacatctgcaatgatgttctggagctgttggacaaatatcttattcccaatgctacacaaccagaaagtaaggtgttctacttgaaaatgaaaggagattattttaggtatctttctgaagtggcatctggagacaacaaacaaaccactgtgtcgaactcccagcaggcttaccaggaagcatttgaaattagtaagaaagaaatgcagcctacacacccaattcgtcttggtctggcactaaatttctcagtcttttactatgagattctaaactctcctgaaaaggcctgtagcctggcaaaaacggcatttgatgaagcaattgctgaattggatacgctgaatgaagagtcttataaagacagcactctgatcatgcagttacttagggacaatctcactctgtggacatcggaaaaccagggagacgaaggagacgctggggagggagagaactaatgtttctcgtgctttgtgatctgttcagtgtcactctgtaccctcaacatatatcccttgtgcgataaaaaaaaaaaaaaaaaaaaaaagagaatcgtacgtcgactttcgatttttcacagcctcagcctaggaaaaatggttcatgggataaacagctggtatttgtatctaaaactcagattggtcacataaatgccacggcattccgaagttttgattttgattaacattgacaggattactgtgtgtttaattttttaaaaactgaacactgtgattatggggttttgtaatttagcagaactcttactggtagaaaaaatagacctgaattatgtgtaactttttggaaggtttaatctgatatcaaaataatcattgaaatacaattccattgtaaagttgtacagaaagttatagagattatattgtgatgctggaacttggagtgagacacacatcatttggcatttgagttgaatggtaattcacagtaatgctgccgttgttcgggacttaaagacacttgacctgtttgggctgttgccacttaaaagttcatgaccacaaatgtccacagtgtcttcctctgaggaaactcgaatcctgaaatggaaattctttgtggcagataactggcttatgacaccttgaaaagttcaagtgctcatataacacaccacactgaaccccctttcctacagcaatatgttcactatgttaccaatttgcaacttgtgcttcaatagtggaatctactttcattgttaacactgagctaaagaaaaaaagccgtgtgttttatgaatgaccttatctgtttcctggataatacctttaagaataatgtcctgagtcaggcgtggtggtgcgtgcatctagtcccaactatttgggaggctgaggcaggaggatcgcttgagcccaggagtttaaagctgcagtgccctgtggttgcacctgtgaataactgcactccagcctgggcaacatagcgagacctcatctccaaaaaagaaaacaaaaaacaaaaaaaggaatgatgttctgtagagatggcctttcacttgaggagtactcagttttcaggttcttcctagctcggggcttttaaattttgaaatctaaacattctttcccaccatcctttttgactgttgaccttggttttctcttctaagtttctgtccctctgcttccttactttttttcctttttgaattctatctttatctgtcttttgttcactttttaatgctatatatgggcaggggtgagagacattactgagcaccttggtgagcaagcctggctttaaagattggagaagagcttctggcaccagaaccctgtcttcctccagttctcaacacggtgttgctcttcagtcataccggaatctgaatcaaaaaagtatttttaaatatccatgatttctccctgtattgaggctagccctgatcatgctttttgtgcctgtcaccaggtctcccaagtgcactcatccaggtcagtgctcagatgtgtttaaggagaccctatattcagggaagttgcgtgaacactgcagtggggagaattgagaatagtcaggcctatcagtctcacagaatcacccctctacctttgatattccacttagctgtagagtccatctgtttgtccatctgctgaaatgagaaaagaaaaatttatgcactgatttaaaacaaaccaaaaaaaaagaaaaaaacaaaaaaaaaaatccctcctttctagctgaacaaaaatgtgcagttaatacttggcgcttgaaaatgcagtagtgaatgtggaaccaagcctgtctgtatatctggtagctcttttcttgctttgttttttcttaccagtattctgcctaacgtttgcttctgtgatggttatattgcctagcaagcacacccgtggttgtgaaaatagtatagcaaaaaagaaaaatccccggttattgatgtactagatttgtgtatgtcttttaaacagttctagtttcaccttacacagaataatcaggaaaagtgtaaaaattcaaaagtgaaataaaaattttatcagttagttgcctgtgaaaaaaaaaaaa

SEQ ID NO: 268 - DNA, 517 bp, Artificial Sequence
  SCGB2A2
tccacagcggcttccttgatccttgccacccgcgactgaacaccgacagcagcagcctcaccatgaagttgctgatggtcctcatgctggcggccctctcccagcactgctacgcaggctctggctgccccttattggagaatgtgatttccaagacaatcaatccacaagtgtctaagactgaatacaaagaacttcttcaagagttcatagacgacaatgccactacaaatgccatagatgaattgaaggaatgttttcttaaccaaacggatgaaactctgagcaatgttgaggtgtttatgcaattaatatatgacagcagtctttgtgatttattttaactttctgcaagacctttggctcacagaactgcagggtatggtgagaaaccaactacggattgctgcaaaccacaccttctctttcttatgtctttttactacaaactacaagacaattgttgaaacctgctatacatgtttattttaataaattgatggcaaaaaaaaaaaaa

SEQ ID NO: 269 - DNA, 2742 bp, Artificial Sequence
  SH3GL2
agttggcgccagcatccaggtaccgcgcgccacagcacctgcctgggcgttcccgcgcttggggcggggcttcccgcgtcccctttaagaggccgcatcacccgcccttgacgtcagagtgtttctccgcaagagcccgtgtcccgctaggctccgcgccctcgcgcccatagccccggcggcggcacgaccagaggcggccaggggagcgcgccgccccgctcggccctccagtcccgctccgccgcctccctcccgcacagcagccgccagcgcggcctcctgcaccatgtcggtggccggcctcaagaagcagttccataaagccactcagaaagtgagtgagaaggttggaggagctgaaggaaccaagctagatgatgacttcaaagagatggaaaggaaagtggatgtcaccagcagggctgtgatggaaataatgactaaaacaattgaataccttcaacccaatccagcttccagagctaagctcagcatgatcaacaccatgtcaaaaatccgtggccaggagaaggggccaggctatcctcaggcagaggcgctgctggcagaggccatgctcaaatttggaagagagcttggagatgattgcaactttggcccagcacttggtgaggtcggggaggccatgcgggaactgtcggaggtcaaagactctttggacatagaagtgaagcagaacttcattgaccctcttcagaatcttcatgacaaagatcttagggaaattcaacatcatctaaagaagttggagggtcgacgcctggattttgattataagaagaaacgacaaggcaagattccggatgaagagcttcgtcaagctctagagaaatttgatgagtctaaggaaattgctgagtcaagcatgttcaatctcttggagatggatattgaacaagtgagccagctctctgcacttgtgcaagctcagctggagtaccacaagcaggcagtccagatcctgcagcaagtcacggtcagactggaagaaagaataagacaggcttcatctcagcctagaagggaatatcaacctaaaccacgaatgagcctggagtttccaactggagacagtactcagcccaatgggggtctctcccacacaggcactcccaaaccttcaggtgtccaaatggatcagccctgctgccgagctctgtacgactttgaacctgaaaatgaaggggagttgggatttaaagagggcgatatcatcacactcactaaccaaattgatgagaactggtatgaggggatgctgcatggccattcaggcttcttccccatcaattatgtggaaattctggttgccctgccccattaggatgttatgctggctggctcgcctcctcttgacccagatagttacggttaaccactgctttggcaatgctgcttataacacatcccaagtgcaggccgcagtggtccacgtcatccagccccaccaagtgactttggttgacttgtgggctcccacaggagtcatggtgatggatgatatcctcttagcctggtgggcgtggcatgtgctttttaaaacatcatctgagaccagccagtagtcacagaactgctgtttacacagttctcaggaggctgtggtttcttagaatatgaccatgagccatttcacagaaaaaccatcccaccgaagatattgtctatcaccccaggggccatctgaaggtctctttgcatttctccatgcaaagaggagaaagcttttgctttcacactgtcccttcccaaatatgtgagtcatggaattgtcaaagtaagccttccctcaccagcaaattgtctcctgatctgaatgaatttgtctcttaatgcatccatagaaaagtgttaattgtgggttcaaagcattctctgcaaataggcatctcagctcctcacacttatggctatttctgacgtatagccagttttcttccctccttgctattaaagccagagcggtaattccaaattatttttcagtaagacagttaatcagcattattgtgagagggactgaaaagaaattctccattatgaggaattgggaagaaatctggtatccaagcttaaatttcttgctatacagaaactatgtatgtatttaggctatttctgaagggcacagggaagggggaacaaatatcttcacttcagttttatttgtgaattacatgtttcatgaatccatttggcacagagacacaaggaagaaaacactagtaaccatctttccactagttcatatactgagaaacagtaaatacctttcctttccacttttaccctgtgttctttgaacatcatttgtgcagattctgccctcaatgaggaccaaataaagatgatttttgtgcttagcagtttaaggtatatggctgcatatgcaaaactctttcccaattcagtcgctacttttacttctgccctttctatccatcgtcttcattttgtgtgtacagtgctgtgtgtaagcttatcagtgtgtttttttatttgtatcagtcatgaaagtcctgttaggtatccagagttctatttatctagctgtacagactctttcagaggtttaacgtgctgcttccgatgtgccacctgcagtagtggatcatgtggagtgaaaggcaaatcttactgcttaatgtataaactctcaccacaggaagcatcgctgtttccaataaatattgctgaagacagaaccaaaaaaaaaaa

SEQ ID NO: 270 - DNA, 623 bp, Artificial Sequence
  SPINK1
gatagttttataagggacttttctcccttttgctcaatacttctccttgctgctgccatgtgaagaaggatgtgtttgcttctccttctgccatgattgtgacattcccagaacctggaggccaggctatgacacagagtcaatcaataaccagggagatctgtgatatagcccagtaggtggggccttgctgccatctgccatatgacccttccagtcccaggcttctgaagagacgtggtaagtgcggtgcagttttcaactgacctctggacgcagaacttcagccatgaaggtaacaggcatctttcttctcagtgccttggccctgttgagtctatctggtaacactggagctgactccctgggaagagaggccaaatgttacaatgaacttaatggatgcaccaagatatatgaccctgtctgtgggactgatggaaatacttatcccaatgaatgcgtgttatgttttgaaaatcggaaacgccagacttctatcctcattcaaaaatctgggccttgctgagaaccaaggttttgaaatcccatcaggtcaccgcgaggcctgactggccttattgttgaataaatgtatctgaatatccccaaaaaaaaaaaaa

SEQ ID NO: 271 - DNA, 1787 bp, Artificial Sequence
  SERPINB4
aaccacagagggaaaggcagcaagaggagaggcataaatttaggatctcacccttcattccacagacacacacagcctctctgcccacctctgcttcctctaggaacacaggagttccagatcacatcgagttcaccatgaattcactcagtgaagccaacaccaagttcatgttcgatctgttccaacagttcagaaaatcaaaagagaacaacatcttctattcccctatcagcatcacatcagcattagggatggtcctcttaggagccaaagacaacactgcacaacaaattagcaaggttcttcactttgatcaagtcacagagaacaccacagaaaaagctgcaacatatcatgttgataggtcaggaaatgttcatcaccagtttcaaaagcttctgactgaattcaacaaatccactgatgcatatgagctgaagatcgccaacaagctcttcggagaaaagacgtatcaatttttacaggaatatttagatgccatcaagaaattttaccagaccagtgtggaatctactgattttgcaaatgctccagaagaaagtcgaaagaagattaactcctgggtggaaagtcaaacgaatgaaaaaattaaaaacctatttcctgatgggactattggcaatgatacgacactggttcttgtgaacgcaatctatttcaaagggcagtgggagaataaatttaaaaaagaaaacactaaagaggaaaaattttggccaaacaagaatacatacaaatctgtacagatgatgaggcaatacaattcctttaattttgccttgctggaggatgtacaggccaaggtcctggaaataccatacaaaggcaaagatctaagcatgattgtgctgctgccaaatgaaatcgatggtctgcagaagcttgaagagaaactcactgctgagaaattgatggaatggacaagtttgcagaatatgagagagacatgtgtcgatttacacttacctcggttcaaaatggaagagagctatgacctcaaggacacgttgagaaccatgggaatggtgaatatcttcaatggggatgcagacctctcaggcatgacctggagccacggtctctcagtatctaaagtcctacacaaggcctttgtggaggtcactgaggagggagtggaagctgcagctgccaccgctgtagtagtagtcgaattatcatctccttcaactaatgaagagttctgttgtaatcaccctttcctattcttcataaggcaaaataagaccaacagcatcctcttctatggcagattctcatccccatagatgcaattagtctgtcactccatttagaaaatgttcacctagaggtgttctggtaaactgattgctggcaacaacagattctcttggctcatatttcttttctatctcatcttgatgatgatagtcatcatcaagaatttaatgattaaaatagcatgcctttctctctttctcttaataagcccacatataaatgtacttttccttccagaaaaatttcccttgaggaaaaatgtccaagataagatgaatcatttaataccgtgtcttctaaatttgaaatataattctgtttctgacctgttttaaatgaaccaaaccaaatcatactttctcttcaaatttagcaacctagaaacacacatttctttgaatttaggtgatacctaaatccttcttatgtttctaaattttgtgattctataaaacacatcatcaataaaataatgacataaaatcaaaaaaaaaaaaaaaaaa

SEQ ID NO: 272 - DNA, 581 bp, Artificial Sequence
  HTN1
acatcagccatatagaaaaggacatctcttgagacttcacttcagcttcactgacttcttgactctcctcttgagtaaaaggactcagccaactatgaagttttttgtctttgctttagtcttggctctcatgatttccatgattagcgctgattcacatgaaaagagacatcatgggtatagaagaaaattccatgaaaagcatcattcacatcgagaatttccattttatggggactatggatcaaattatctatatgacaattgatatccttagtaatcatggggcatgattatagaggtttgactggcaaattcactttttactcatttattctcattcatcataccgcatcacactaccactgctttttgaagaattatcataaggcaatggagaataaaagaaagaccatgatttagtgaattctgtgtttcatgatacttcccttcctaattatcatttgattagatacttgcaatttaaactgttaagctgttttcactgctgtttctgagtaatagaaattcattcctctccaaaagcaataaatttctagcacattattaaaaaaaaaaaa

SEQ ID NO: 273 - DNA, 1523 bp, Artificial Sequence
  CPA1
agaactcccaccccagcctccccgtgggacaggacccaggtgctgggggagaacagacctcgggagcagccaggagtcctcggtcctgggagggtttaaaagccagggggccgtctcgacctcagtctgaccttccctcccggcagcagcatgcgggggttgctggtgttgagtgtcctgttgggggctgtctttggcaaggaggactttgtggggcatcaggtgctccgaatctctgtagccgatgaggcccaggtacagaaggtgaaggagctggaggacctggagcacctgcagctggacttctggcgggggcctgcccaccctggctcccccatcgacgtccgagtgcccttccccagcatccaggcggtcaagatctttctggagtcccacggcatcagctatgagaccatgatcgaggacgtgcagtcgctgctggacgaggagcaggagcagatgttcgccttccggtcccgggcgcgctccaccgacacttttaactacgccacctaccacaccctggaggagatctatgacttcctggacctgctggtggcggagaacccgcaccttgtcagcaagatccagattggcaacacctatgaagggcgtcccatttacgtgctgaagttcagcacggggggcagtaagcgtccagccatctggatcgacacgggcatccattcccgggagtgggtcacccaggccagtggggtctggtttgcaaagaagatcactcaagactacgggcaggatgcagctttcaccgccattctcgacaccttggacatcttcctggagatcgtcaccaaccctgatggctttgccttcacgcacagcacgaatcgcatgtggcgcaagactcggtcccacacagcaggctccctctgtattggcgtggaccccaacaggaactgggacgctggctttgggttgtccggagccagcagtaacccctgctcggagacttaccacggcaagtttgccaattccgaagtggaggtcaagtccattgtagactttgtgaaggaccatgggaacatcaaggccttcatctccatccacagctactcccagctcctcatgtatccctatggctacaaaacagaaccagtccctgaccaggatgagctggatcagctttccaaggctgctgtgacagccctggcctctctctacgggaccaagttcaactatggcagcatcatcaaggcaatttatcaagccagtggaagcactattgactggacctacagccagggcatcaagtactccttcaccttcgagctccgggacactgggcgctatggcttcctgctgccagcctcccagatcatccccacagccaaggagacgtggctggcgcttctgaccatcatggagcacaccctgaatcacccctactgagctgaccctttgacacccttcttgtcctcctctctggccccatccaggcaaccaaataaagtttgagtgtaccaggaacagaatcctggggcttgcaaaaaaaaaaaaaaaaa

SEQ ID NO: 274 - DNA, 2618 bp, Artificial Sequence
  FCAR
tccacccaagagcaacctggaactaagttattcggcaacgaactgttccactttgttgtgaggcaatagatgtggaaattccctgacgaggggctctgtcctcatacttcctgcggagcttattgtcgtaagaatatctgtcatcctgctaatgtgcattgaaaggagagcaacggggctgaggccgtgtcagcacgatggaccccaaacagaccaccctcctgtgtcttgtgctctgtctgggccagaggattcaggcacaggaaggggactttcccatgcctttcatatctgccaaatcgagtcctgtgattcccttggatggatctgtgaaaatccagtgccaggccattcgtgaagcttacctgacccagctgatgatcataaaaaactccacgtaccgagagataggcagaagactgaagttttggaatgagactgatcctgagttcgtcattgaccacatggacgcaaacaaggcagggcgctatcagtgccaatataggatagggcactacaggttccggtacagtgacaccctggagctggtagtgacaggcttgtatggcaaacccttcctctctgcagatcggggtctggtgttgatgccaggagagaatatttccctcacgtgcagctcagcacacatcccatttgatagattttcactggccaaggagggagaactttctctgccacagcaccaaagtggggaacacccggccaacttctctttgggtcctgtggacctcaatgtctcagggatctacaggtgctacggttggtacaacaggagcccctacctgtggtccttccccagtaatgccttggagcttgtggtcacagactccatccaccaagattacacgacgcagaacttgatccgcatggccgtggcaggactggtcctcgtggctctcttggccatactggttgaaaattggcacagccatacggcactgaacaaggaagcctcggcagatgtggctgaaccgagctggagccaacagatgtgtcagccaggattgacctttgcacgaacaccaagtgtctgcaagtaaacacctggaggtgaaggcagagaggagccaggactgtggagtccgacaaagctacttgaaggacacaagagagaaaagctcactaagaagcttgaatctacttttttttttttttgagacagagtctggctctgtcacccaggctggagtgcagtggagcaatctcggctcattgaacctcttgggttcaagtgattcttgtgcctcagcctcccaagtagctggaattacaggcacataccactgcacccagctaatttttgtatttttagtagagatggggtttcactgtgttggccaggctggtctcgaactcctgacctcaggtgatccacccaccttggcctcccaaagtgctgagattataggcatgagccaccacgcctggccagatgcatgttcaaaccaatcaaatggtgttttcttatgcaggactgatcgatttgcacccacctttctgcacataagttatggttttccatcttatctgtcttctgattttttatatcctgtttaatttcttccttcattgttcttctctttttttatttattttatttatttttatttttatttttatttgagacagagtctcactctgttgcccaggctggagtgcagtggcacgatctcggctcactgcaacctctgcctcctgggttcaagtgattctcctgcctcggcctcccaagtagctgggattgcaggctcccaccatcacgcccagctacttttacagtatttttagtagagacggggtttcatcacattggccaagctggtctcaaacttctgacctcgtgatctgcccgcctcggcctcccaaagtgctgggattacagatgtgagccactgcgcccagccttctttttatatttttaaatgtgtcttccccaaatataaatggttggtaagcatgccaaatatattcaataacccccctcctttatttttttttgttgaagtgaggctctccctatgttgcctaagctggtcttgaactcctggtctcaagcaatcctcctacctcagcctcctgctgtgttcatctacaaattgataagagtgaaagtcataatcctacaggaggattaccctatttatttcacaaaccctatttctaccggattttcatacaaggaatacaggcatgtgtttcacctcattaatttattttttcacttagttttgatgatattcacatatattatcaagtgtgcaaacattaaattcttgtgtacaaaactcaaatggtcttccaaataattccccattcttttttcttataaactttcacagctttacccttgacagactttactcaaggaaatctaagttggtcatatgtggctctttcactgattgctatttacttcattgtccagtagcttatgtatgaaaatataattataaaatgtaagggtcctacttccagtgaaactgaagggacttaggcccacttttatcctttactgagagcttatctctacttgataaaatttctactgtattcttggcttaactcaggtcctgtgattaaaaaaaaaatgcaaagta

SEQ ID NO: 275 - DNA, 9949 bp, Artificial Sequence
  CFAP47
ggtcgtcgacgctaatccttggccggacggatccacatctgttttctggctaccgagagggcagccatgaacacccaaaagggttccctcaccataaacgtccacagaggttccctcgccatgagcatccaaaggggttccctcgtcccccgggatatggatagctcgggtagagacatgcagctgcgggtgatcccggctgaggtgaagttcctggacacgatggccgggagggtgtaccgcctcccgattactgtgcataatatttgccgctggaaccagaaaatccgatttaaggagcccgtcaagccacagttcaaactgatgttgaccagtctggataaagaacttgcttctggccttcagatgacagctatggtggaatatcatcctgataaagacgaagacacttttgaccggctacttatttcaatagaaaataaaacaacagaaattcctctaattgggttgattccatcctgtcaattggaaattgaatcagtagttaattttggcacactggttgccaatagtaaagtatattctaaagagattactatcactaaccatggcaaagctccaggcatatttaaggcagaataccacggccaattacccatcctcatttttccaactagtggtatcgtggatgctaagtcatcaatggttattaaagtagatttctgtgcagaccagccaagaattgtagatgaagaggcaatagtgattttgcaaggtcaacctgagatgctcttgagtatcaaagctcatgtggttgagcagattattgaattattaagcatgagtagtgacagaaggctggaatgcatacactttggtcctgttttcttcggatcatcaaaaattaaacatgcacgtgtatacaataatagcccagagcccataaattgggtggccatcatacaagatgatgccgtgggagaagaattgggtacagatattcaacaaagaacagatattgctttaaataatctcacctacataagaaaaataaagaacatagatactactatcattatctcctgtcttcctaatgaagggactttacaaccttatcaaaagactgtaattacattttgtttcaccccaaagctaatggctgttggtaaaaaggatattggaccttcatacagacaggactatgctctctttttgagatttgagtccgtaggaagtaaagatggatttttgagagatgatgactataaaaccatcaaaagtgaacgatttcagaaagtggaattagcactgacaggcacaggacttcctgttttactacagtttgatccaggaccagttcttaattttaaaccttgtttcatgggtgaacgttcagaaattcagtgcatcataaaaaatcaatgcgaattacttcctgtgacgtaccactttaaaaaaactgcaaattttgaaattgatcctgaaaagggcaagattactggagggggtatggtggatgtgatgtgttcatttgttccacatcaacttggagtcttcaaagtgaagcagatgatagagattattggtttagtggcagaagaagatttgcaatctttgtcggtaaaatctttccatcacgtatatttagctttcaacagcatctgtaaagcttccaccaagaaagttgtgatgaaatttgatcctggtatattgccttcgatccgtaatcccacgggaaagtttgtggtcaaagacttggcaaaacgcaagaattatgcacctgtagcaatgcttcaatcagccatgacacgcactcacaatcatcgctcatgtgaagagccagtgaaggatatgctattagcctttcccaatgaccgagctgcaactatcaggtctaaagaccatcataaacatttcaggccaattttcacaaaagttccaagatttaactatgtgaatcatgattttgcatatactacatttgaaaaacagcaaaagaaattacatgaaaactattatgcaatgtatcttaaatatttaagaagtgtgcgcttgcagaagaaacaagcagagagggagcgcatgtattcatatgatgatacagacataggcttagagccaggatcaggtctaaagtcaccctcactctcagaagcggaaatagaagaggagctgtcttcagcagcaaattcaattagagcgaatcgattgttaaccaccaggggtatagcatctcaggaggaagagtctgtgagaagaaaggttctcaaaggacttaaatcagaaccatccactccacaagaaaaacatgattgcagcttaatgttgacaccaaagcaaattcatcaagtaattgttgggccttctgtccttaactttggtaatatttgtgtgaactctccaaatactcatctacttcatgttattaatatgctacctatgcatgttttgctccagttagatactgatttagaagaacttcagaagaccaaccaattttcatacgtgattctacctacatccagtacttatatttcaatggtatttgactctcccaccattggaaaattttggaagtctttcacctttacagtgaacaatgtacccagtggacacatcctagtggtggcagttgtccagccagtaacacttgagctatcttctaatgagctagtattgagaccacgaggcttcttcatgaaaacatgttttcgggggacagttagattgtataatcgtcagaattgttgtgctcagtttcaatggcaacccgtaaacacaggaagagggatagcattttctatttgtccagctaaaggcactgttgaagcatattcctcactggaatgtgaagtaacttggcagcagggcttcagttctccagaagaaggagaatttattcttcatgtctttcaaggaaacgcgttgaagctaaaatgtgttgcacatcttggtcgcaccaaggttttacttttgcagccaaggatactctttagtaattgccctcaaggtttaacaacttggaggaaagccattcttcaaaatgtaggacaaaaccatgcttatttcaaggtttgtagtcagagtcttttgcctatcattaatattattccatcgcaaggaatagttccatttgggggaataactgttctcaatatctcctgtaaacccactgtggcagaaaagtttgatacaagagcaaaggtttctattcgtcatgcgaatgttatagaccttaggattggtggatctgctgaaattgctgatgtagaaatcaatcctgatgtatttaatttcagtggcgcctatattggtggtacccagattattccatttgtaataaaaaacaaaggtataacacgtgccagagtggagtttaatctaaaagactttccggatttttcaatggatcttaaagacaaatcagaagaatttaaagaccctgcagttccttatatatattctttggaattagaggaaaatacatctctggaatgtagcataacattttctcccaaagaagtgacagtagttgaattcatcattcaagttcagattaatttctttgagtcttcaaagctctacactaaatatttgtccagttctccttcgaatccaaaaacagtaccacttatccgaccatgttacgttcaagctactgcattgcaatcaccattgaacttatctagtactaagtttgtatttgaaatccctttacatgagatgaatcctaataacaaggtcacaaaaactcagaatcttgttttatataatattaccaaacaccatgtgacatggactttggatcttagtaatactggcaaacttttcaaagacggcacattcaagttcagtgtactgaatgggattctacgaccaaatgaaaagtataatgtttccataagtttctgtccaaatcgtcctgggacatacacagcagatattcctatgcttttaaattatattccagtttgctataaaatattacatcttactggggaagtaaaatcaccagagttattgtttgaccctccatttatatttttcactcctgttcctttggatataacaactgtaatggatatcaacattttacctcaaaactatttcagaaattcaactctatgtgtccagattcccacagtaaggcttcttgatggtgaagagattcaccctctttctgtgaaatttccaaaaggcagagtcatcccaggctctcacagtggaattaataataagctcacttgccacctcagtttcaagtcatctaaacctgtgtcattttttaccaatcttcttttctgtgatgacagaaaaaactggttttcacttccagttactgcaacagcagaaaactgcattcttactatttacccatatatggcaattcatctggataagcaaaacattattttaaagaatgataaggatgaatatcttaagaagactagagatggtgttttgcctccctaccaggatgctaaaccaccctctcctgcttcaattaaaaagacatacaccactagcaaattcaatgatgctgaacctgcaaagggaaacttatttattggagtggaagtactgcctgaaaatttgcacttggatgaaagtgaaacatcagaggaagatcatgggtctctggaaaaggaaaaatatgaacaattcctttctcttgaggaaggaacaaaggcacactacttttttgagaaggttgtaaatgcagcacagacctggttcagtctctttggctggcctgaaggaccccattctttttctattccagagactataagaagggatgtatataaaatgcaattctactcatcaacctcgccaccccaaaagttttccagacagaatgacttttccaaatataataagaccatttatgatgtgctgctccatttgagtggaaaaatgccacctggaattaattcaagtcaatctttacctgtagataaccatgaaaaaagggtaattcaactccatttgcaacattcctcacttctggactttctcaatgctcaaggaggatgtatttcacatgtcctgccagaatttttgcttgaaccagaagattataagaggtggattgaaattatgtcttccactaatacgatgcctgtgagttcctgtacacctaagaaaaaatgttctattgttatagaaatgtctaaatttgaagcctggagtaaacgggcatggacagatgtatttctacagatatacaaggttttggttctatcccgtgtagtgccatactgcagcaataatatgccccccatatgtgtgcaaaatacaccaaaagtcaatccttgttttgcatccagcaacatatattctgattctgaaagaattttgcttagttggatgaacataaattatgagaatactcgacatgtgatatggaaaaactgtcacaaagatgttatcccttctgagagatggatagtaaattttgacaaagacctttcagatggtcttgtttttgcaacacagttgggagcctattgcccattcttgattgagtctcattttataaatatgtacacacgaccaaaaagtcctgaagagtatctgcacaattgcctgattattgtaaatactctttatgaaattgactttgacgtggaaatacaggccacagacatctgtgacccaaatccaatcctgatgctcatgctttgtgtctacatgtatgaaagactccctacatatctccctaagaaggtggtgtcctttgaatgtactctacatgacacggtgctgaataagattctactgaaaaattccagctcgcgaaacttagtgtataatgctagaattgttggaagagatgctgctgacttctccctttcccaaaaagggaatgttgtgacaatttctccaagaaatgaaattaatgtcactctgaaattcaccagtcgctttattcgtcctgctgaagcttcactactattaatttcaaaacccaagaatgcagtaagaggaattacaatgacttttgctcttaaaggcaaagtcctcgattttaaagccattgacattataaaatgcgaaagcccatgttatcaatttcaggaagtcactgtaaatgtgaaaaaccccttccatacggctggggacttcagtgtcattttggtggaatcctcaacatttgtctcttcgccaacgaagttaactgaatccaggcaatacccgaaacatgatgatgatatgagtagcagtgggagtgacactgatcagggctgttccgattccccaaatgtcttacatacctcaattaagtccacttttatcagagagttcttctgctccatgcatactgttcacctgggagtgaaaggaacttcaagcctagagctccgctttcttccctttaacatgcacgtgcgctactgtgtcatcatcttgagcaacaaaaagattggacaattaatatatgttgcggaaggaaaaggtatgacccccttgccttccagttgccttccaatgaatacgtcttcaagtccagtttattacagcactactcgagaagaagggcctaataagaaatacccagttctgtatttgaaatgcaaaccctatcaaatcctgtatgtggaccttaaattgccaatgactaatgaagccaaggaaaaggctttggcttttgcagcacagcaacagatgtcgagtattgagtatgagcgaaggttgatcacaggcactctagagagcagtagtatccgtgtggccatcgccctcctgggactgacgaagatcgagactcttatgctctttcgtatctcaaagttgaggaagcctaagaccgtttcatacacaacagaagtgagccttccaaagtatttttatatccctgagaaaatctccattccttggattccagaacctcaagtaattaaactttcaaaagcaaaagcttcagatggatctgttccacttcctttgcaatttcttcctctccaatctggacgctacccttgtaaaattttattgaaatcaaggtatgatgtgcgtgcctattatgttgaaggtattgtgaatgaagaacaaccagaggccaaatttgagtttgaaacaccagcatttgaagcccttactcagaatattccaataaaaaatcaaacaaacgataaatggacctttcaagttactatagaaggagaatggttttatggacctgttgatttacatgttggaccagatgaaattgtggagtatcctctcacattcaaacctatttttgaatgtgtcattacgggtaaacttattctacaaaatgaagtagatggtagggagcacatctttgacataaaaggggttgggaaaaaaccttcggccttggaacacatcactgtggaatgtcaagtggggaatgtgacacaaaagcatataacattgcctcatttcacaaatactgccctaacatttaaggtaactgcagatcttccaatagtgtggggaaatccacaaattacagtatacccttataaagaaattctgtacctgattcatgtgcgcccttggaaacgtggtatattgaaaggtacaattacattttctactacaagaagatgtactacaagaaggaaacatgatgattatgaggaagacacagatcaagatcaagccctctcctgtcttgattcaataacagaacaatctagcattttggatgatgcagacacatatggtaattttaacaatttaagattctggtataatcttgagatccatagcactcctggaccacccatagagattatggaaatgacatgtattgctctggacagcacttgcattgaaatacctctctctaatccaaaagatagaggtcttcacttagaggtgcagttaacgagtgctgcccttaatggggataatgaaattatcctgagtccactacagtgcaccaaatatattgtatggtattctccagcaactacaggctacagcgatgaaagcattatttttcagcctgaaatggctgaagagttctggtatttactgaagttaactattgaattaccaaaaccaaccacaatgccagaaatacagtgcgaccttggcaagcatgtcactcagatcattcctttagttaattgtacgcatgaaaccttaaaattgcaagtaacaaacagtaatcctgaaaattttgtcctggatattaacagaaaatcacaactgatcatatctcctcactccaccacagaattacctgttctcttttatccttctgcacttggaagagctgatcatcaagcttgcatcaacttctactgtactcagtttacagaatggaaattctacttatctggagtaggactatttccccagcctctagacacggaaagaataaccacacgcattggtcttcagtcaactattgttatacctttcaaaaatcccacaatggaagatgtcctcattgatataatactgacaagtgtggaacatcccaggaatcttgtcatggatcattgctgggatagcttcatctatgagagttctgccttcagatttagttctccgagtgaaatacaaggaattgcactgcctcctaaaggaaatatagatatctcattgttatttatacctcaaattatgaaattacacaaaacaatggttattattgagatgacgaaagcaaatggaaaatattggcctattgacaattttgatgagttggatataaaatttaaaagtattgtgggaatcgacagcgaagaaatccaagcaatacactggatataccctattgttggactcccacaagcaccacctcctaaatctcccccagttgtcatacaatgtcagtccaggaagcgggcagaagagaaggtagaaatcatactgaatgctggttttttcggatttagtcttactccagatctgacagaagttttagtgattccaaaaagaaattcacataatttttgtgaggatcccaatgaaattcctaaaatacatgaattcgagtatgaaattcaatttgaatctgaagctatgaagtctaagttggaatcctgtgtagctttatatatgattgaaaaatcttatgatattatggctaaaaggataacatttatcttcaatctggtattcacaccaaagaaaccattaaggtctcacataacactgaaaatagagtgcgtaacagaagggatctggaagtttcccataatgttgatcgctactgaacctgatacggatgctgtcattgacattgaaggagttggtttatttaaggaatctgtttttgaacttaggctgaaaagtcagacaagaaatcctgagccgttcaccgcacacttcctacctggcagcgatctggagttttttgtaaaacctcaggctggagaacttcttccttttaacacaaacggaactctcatcactgtaggatttaaacctaaaatgtactgtaggaaatataaagcaacattagtaatacagacagaagaaatgtactggaagtatgagatcaatggattaactccaactaccgtgccaccaaaaaatgcaaaagccaaaattgatgctactcacaagacacatgacaacatgccagtccgtccacataattttgtccgtgaaaatactaaactcataagaacaggggtgtcttccaccatcaagggtgctcctttggtgaagaatcaataaaatttttttccaaaatatttcttggtctcaggtagaactttgatgactattatttcatcttttggaatatttctgaggaataatggtttaattataataggccttctatatttccttgtcttttaaaattcaatctgttctctgaatatattatacttcatttgtgagttatgaatgttttttggttgcgaacattggaattggttcacttttaaagtgcaggtgtatatttgtggtaaaacgaaatataatttaaatgacaacagtatttccaataacagcgttgctaataaagctaaatgtctcatgtagaaaaaaa

SEQ ID NO: 276 - DNA, 893 bp, Artificial Sequence
  APOBEC1
tatttttagtagagacagagcaccatgacttctgagaaaggtccttcaaccggtgaccccactctgaggagaagaatcgaaccctgggagtttgacgtcttctatgaccccagagaacttcgtaaagaggcctgtctgctctacgaaatcaagtggggcatgagccggaagatctggcgaagctcaggcaaaaacaccaccaatcacgtggaagttaattttataaaaaaatttacgtcagaaagagattttcacccatccatgagctgctccatcacctggttcttgtcctggagtccctgctgggaatgctcccaggctattagagagtttctgagtcggcaccctggtgtgactctagtgatctacgtagctcggcttttttggcacatggatcaacaaaatcggcaaggtctcagggaccttgttaacagtggagtaactattcagattatgagagcatcagagtattatcactgctggaggaattttgtcaactacccacctggggatgaagctcactggccacaatacccacctctgtggatgatgttgtacgcactggagctgcactgcataattctaagtcttccaccctgtttaaagatttcaagaagatggcaaaatcatcttacatttttcagacttcatcttcaaaactgccattaccaaacgattccgccacacatccttttagctacagggctgatacatccttctgtggcttggagatgaataggatgattccgtgtgtgtactgattcaagaacaagcaatgatgacccactaaagagtgaatgccatttagaatctagaaatgttcacaaggtaccccaaaactctgtagcttaaaccaacaataaatatgtattacctctggcaaaaaaaaaaaa

SEQ ID NO: 277 - DNA, 1923 bp, Artificial Sequence
  CRTAM
gagcaggagccacagaacacacagttctggggtttctgcacaacctctacaagcaggtagccgctaaatatattctccaatctcttttactgagcacaatgtgggtaaaactgctctctatagtagcagaattttgtttttcccctttcctagttactgatgaagagacagcttcagatgctctggagagaaactctctatcctctcaagacccacagcagcccaccagtactgtctcagtaacggaagattctagtacatcggagattgacaaggaagagaaagaacaaaccactcaagatcctgacttgaccaccgaagcaaatcctcagtatttaggactggcaagaaagaaaagtggcatcctgctgctcacgctggtgtccttcctcattttcatactcttcatcatagtccagctcttcatcatgaagctgaggaaagcacatgtgatatggaagaaagaaaacgaagtttcagaacacacactagaaagttacagatcaaggtcaaataatgaagaaacatcatctgaagagaaaaatggccaatcttcccaccctatgcgttgcatgaactacatcacaaagttgtactcagaagcaaaaacaaagaggaaggaaaatgtacaacattcaaaattagaagaaaagcacatccaagtaccagagagtattgtgtagtgctctctgcaatggaacatgtgatttcagggttgccgcagtgtcacctcagtggaccagcctgggggaaggagcttaattgctgagacattaataatgacctcttagtgcaatgcaagatggtgtcctcggataatgatctgccccggagctagggcagcaacatgaggaccaaaccatgcacataaagcttgtagtttaaaaaagaaaagcaaaaaaataattatgcctgacactacttcagagcaggaggattctacgaagccttggggatcagggtcagtgtgagcagctaacatcctacctcaaatggaacaggattttttgatgctttgctctaatggaactgtttaaaaaatttttttttctttttaatattttcttctggtcacaaaataaagaaatttgggatgcaaagtacctaaagatctctgatcctaagaagttacttctggccaggcgcggtggctcatgcctgtaatcctagcactttgggaggctgaggtaggcagatcacttgaggtcaggagttggagaccagcctggccaacatagtgaaaccccgtctctactaaaaatgcaaaaattagccaggcgtagtggtgcgcacctgtagtctcagatacttgggaggctgagggtggagaatcgcttgaacctgggaggtggagattgcagtgagtcaagatctcaccactgcactccagcctgggcaacagagggagactctgtctcaaaaaaaaagaagttacttccaagacagacttttaagatgtaaccagcacaaagcaatgtcagggaggagtgatacatgacaataaatgagtcagatgagcaagaaggccccagaacccatgccccaaggcacaaagaggagctcagggtaggcccaaagattcgaattccttagattactaaatcacatgagcggaccttgtctgtcagataagatttttacctggaaattccatgaccaatacatgtgcaaaagaaaatgatgggttgaatttactgattattgacctaatggatggctttttaaaatgttttaataaaaagcagaatagatgtttgtttttctagtggttataccaagttatacttcctgttttcacgtgtgaaagtaacatgggacatgcctttcttttccgatcagtttatttaagctatacagcaaactttggcatttatgtggagcatttctcattgttggaatctgaataaaccaattacaaaataa

SEQ ID NO: 278 - DNA, 632 bp, Artificial Sequence
  CKS2
gttagtctccggcgagttgttgcctgggctggacgtggttttgtctgctgcgcccgctcttcgcgctctcgtttcattttctgcagcgcgccagcaggatggcccacaagcagatctactactcggacaagtacttcgacgaacactacgagtaccggcatgttatgttacccagagaactttccaaacaagtacctaaaactcatctgatgtctgaagaggagtggaggagacttggtgtccaacagagtctaggctgggttcattacatgattcatgagccagaaccacatattcttctctttagacgacctcttccaaaagatcaacaaaaatgaagtttatctggggatcgtcaaatctttttcaaatttaatgtatatgtgtatataaggtagtattcagtgaatacttgagaaatgtacaaatctttcatccatacctgtgcatgagctgtattcttcacagcaacagagctcagttaaatgcaactgcaagtaggttactgtaagatgtttaagataaaagttcttccagtcagtttttctcttaagtgcctgtttgagtttactgaaacagtttacttttgttcaataaagtttgtatgttgcatttaaaaaaaaaaaaaaaaa

SEQ ID NO: 279 - DNA, 7262 bp, Artificial Sequence
  DSG1
ccagcccaagtttttagggtggggatccagactggttatacgtaccttcagtccttctcccagaggaaggcagaaacacctcaaagcctgcatgtaagaacatctactgagaaattattttaatcagacaccagctgagtgggagaaagaaaaagaacagagaagaacaaacaaaactcccttggtcttggatgtaagagaatccagcagagatggactggagtttcttcagagtagttgcaatgctgttcatttttctggtggtggtagaagttaacagtgaattccgaatccaggtaagagattataacactaaaaatggcaccatcaaatggcattcaatccgaaggcagaaacgtgaatggatcaagttcgcagcagcctgtcgtgaaggtgaagacaactcaaagaggaacccaatcgccaaaattcactcagattgtgctgcaaaccagcaagttacataccgcatctctggagtaggaattgatcagccaccatatgggatctttgtcattaatcagaaaactggtgaaattaatataacatccatagttgatcgagaggtcactcctttcttcattatctactgccgagctctgaactcaatgggccaagatttagagaggcctctagagctcagagtcagggttttggatataaatgacaaccctccagtgttttcaatggctacatttgcaggacaaatagaagaaaattctaatgcaaatacactggtgatgatactcaatgctactgacgcagatgaaccgaacaatttgaactcaaaaatagccttcaagattataagacaagaaccttcagattcaccaatgtttattatcaacagaaatactggagaaattcgaacgatgaataattttctagacagagagcaatacggccagtatgctcttgctgtaagaggctctgaccgagatggcggggcagatggcatgtcagcggaatgtgagtgcaacattaaaatcctcgatgtcaatgataatatcccttacatggaacagtcttcatataccatagaaattcaagaaaatactctaaattcaaatttgctcgagattagagtaattgatttggatgaagagttctcagctaactggatggcagtaattttctttatctctggaaatgaaggaaattggtttgagatagaaatgaatgaaagaacaaatgtgggaattttaaaggttgttaagcccttagattatgaagctatgcagagtctgcaactcagtattggtgtcagaaataaagctgaatttcatcattcaattatgtctcaatataaactgaaagcatctgcaatttctgtgactgtgttaaatgtaattgaaggcccagtgtttcgtccaggttcaaagacatatgttgtaactggtaatatgggatcaaatgataaagtgggagactttgtagctactgacctggacacaggtagaccttcaacgactgttaggtatgtaatgggaaataatccagctgacctgctagctgttgattcaagaacaggcaaactcactttgaaaaataaagttaccaaggaacagtacaatatgctcggaggaaaataccaaggaacgattctctctatagatgataatcttcaaagaacttgcactggtacaattaatattaacattcaaagttttggtaatgacgacaggactaatacagagccgaacactaaaattactaccaatactggcagacaagaaagtacttcttccactaactatgataccagcacaacttctactgactctagccaagtatattcttctgaacccggaaacggagccaaagatttgttatcagacaatgtacattttggtcctgctggcattggactcctcatcatgggattcttggtcttaggattggtcccatttttgatgatctgttgtgattgtggaggtgctcctcgtagtgcagctggctttgagcctgttcccgaatgttcagatggagcaattcattcatgggcagtagaaggaccacagcctgaacccagggatataaccactgtcataccacaaataccacctgataacgcaaatataattgaatgcattgacaactcaggagtttatacaaatgagtatggtggcagagaaatgcaagatctgggaggaggagagagaatgacaggatttgaactaacagagggagttaaaacttcaggaatgcctgagatatgtcaagaatactctggaacattaagaagaaattctatgagggaatgtagagaaggaggtctgaatatgaatttcatggaaagctacttctgtcagaaagcatatgcttacgcagatgaagatgaaggacgcccatctaatgactgtttgctcatatatgacatcgaaggtgtaggttcccctgctggctctgtgggttgttgtagcttcattggagaagacctggatgacagcttcttggataccctgggacctaaatttaagaagttggcagacatcagcctaggaaaagaatcatatccagaccttgatccttcttggccaccacaaagcactgaaccagtttgccttcctcaggaaacagagcccgttgttagtggacacccaccaatctccccacatttcggcactaccacagtaatttctgagagcacctatccctcgggacctggtgtactgcatcctaagcctattctcgatcctctgggctatggtaatgtcactgtgaccgagtcttacaccacctctgacactctgaagccctctgtgcacgttcacgataaccgaccagcatcaaacgtggtagtgacagagagagtggtcggcccaatctctggcgctgatttgcatggaatgttagagatgcctgacttgcgagatgggtcgaatgttatagtgacagaaagggtaatagcaccaagctctagtctacccacctctctgactatccatcatcctagagagtcttcaaatgtggtagtgacagaaagagtaatccaaccaacttccggcatgataggtagtctgagtatgcaccccgagttagccaatgcccacaatgtcattgtgacagagagggttgtttctggtgctggcgtaactggaattagtggcaccactgggatcagcggtggcataggcagcagtggcctggttggcaccagcatgggtgctgggagcggtgccctgagtggagctggcataagtggtggtggcattggcctgagcagcttgggagggacagccagcattggccacatgaggagttcctctgaccatcactttaaccaaaccattgggtccgcctcccctagcacagctcgaagtcgaatcacaaagtatagtaccgtgcaatatagcaagtagtcaggaccccagctcactttttcatagtcattgtggtttagatccaattcccaccactaaaaaaccaacaatgtgatttataacgcacaacttcgtgctcaggtcatctaggagcaaggtgagaaatcacaatgagaaaaataaatggaaacaccactgctaggggagagctctccttagcattcataaacttttctcttatattaggactaaggaactaaaacttgaggcagagtcttctttgtgcctgagtggcctgtagtccatctccagcatgtaactggccttacgatggcaattggcatcattctccttgctctgttttgcttttccatatagctcgagcaaaattcaaaaagaactaaatatgcaatatatgttcatatctatgggaaaaatctaaaatgtgtgccagatgccctgttggtttcacagataacataaataaaaattcaaccacagatttatacaagggttaaccattttttttaagtttgactacatagtcaagtccacaagccatcaagcactcctaccttaattattgcactagagaaaataaattccaaattaggaagtgtttcctaggaggaaaattccattagagagtggcaataggatgaggtttcttcagggtaaactagcaatgcctgagcctgaaccttaatgtggggcctcagttaaatctcctgtggagtcaaggattcttctgattctagtgtgtgtttagtgatagatgtagtcttgacgaatattgcttactggtgaggttgaggaatatcacactcgtctttccctttaccactgtggttttgacttaagaaagcaaaactcactaagtttacttctcgaattgaagcaagtgaggcctgacatggttgtcatcactagtggcaaatgaccttccaagtaagcagatgggaactgaattgtgttttcaggttttgtttttagtaggtgatattcattcgtatccagctctttattacatagctctgaagttaaaatgatttacataggccgagctgtggacaaaaaaaaaagaagcagcagcttgtagtatgcttaagctttggggaatttttttttaaggggatctaaaaaaatgtttttagaacatgtaaaatgtttaatggtgaaagttggaaaagaattcttctgtaaagtaataccatgctaattattcgcttttagtaagtaaagtagtggttgctttagcaaacctctgctgccattttgcaggaatcaaccaggaacctttagcagaattgacaatatggtgttgataagcatgaaataataatagaaacctattctgctagtttatctcaccctctaatttttctcactagcataaattttaaattcctgatttgatttgtcaataagatcttggcttatatatgctgatttataggtagtgtccaaattatatagtataacatatttttctagtttcaaaatttagtaatgtcctatttatgatatatcatttctgtgtgtttgctatgtagtattacccaattaaaaatctctaaaaagaattaaagcattctaagaaaaaggtaaatttactattgcatggtacagaaattttttctttcttaaatacaatgttactataagctcactaaaatgaaactctatatgacaaaataaaattagaaaaaaatttgccctggagttgtgaattatatacaacttttaaagaatttaccccaattactcaaatttcccaggaaattacaaagccaaagaatattcaacttcctccactggtcaaaagaggataggagtgaattactgaacctagagctattttgctctgtaacaacagataaggctaatattttaaaagccacagtatacatcttcttttaactctgtagaatatgtaaaattttgatagtctgtagtatgctaaatgcagaagtataaataaagtcattcaaagggagtcttttctttttctgacacttagggggccacattaaggatgggtaatctttccaggaataaagtcaaaaggtatttattaagacatacttgagtatgcctgggtccaggagttttaaggaatagaaataagtattaatgaattaattaagtaatttattaaagggaatggtagctgaccacaggaaacttgcttactgttttgatatgaaatatcatcacaagcttttcttaagacatctgatatcttccagagatattttttaggttgtcttgcaaacaacaaaatcactgtctttaataactgttgctgtcaaaatccattggttgttaagatccccccaatttagttacatctgaactcctaaacactgttaaacgatgggaaaaacaagaaaaaacatggccatttgagtcattgagtcatctatctttctaggaagatactttctaaccaaacttttcttccaggattgcaaattgatgggaaaaacaagaaaaactgaagtattagtcacctatctttctgggaagatactttccaactaattttttcttccaggattgcacactgattttccatttagtcctaaattttaaaattcccttttcaagacatcaacgattttagtagttatttaaaggcatgtcatttttcaatgaagaagttttgggcagaacttcattcttcttcttagatgtttactctagatcatatacatcatgtcatagaccaagaagagatatggaaattattttataagtgaatactataattaggattcaagctgagtttcagatcaacttgctcttaacaaaaggaaaaagaaatagtaatttaatactatgtatgtatggtttgaaaacaaaccacaatgtttataaaatatctatctgactgtctaaagaggtaatctttaggagcaaaaatcagtgtattataaatactttaccatttaatatcaaccaaaataccatctcaagctaattttgacactgaattacagatatatctgctacatattatttacttctaagcatgttgtctgatgtaattgcatttgcactgaaaaattaaaagaaaaagtacatatttagggttatttatatatcttcatctagacatctgttctacatttgtgtataaagtttttagcatcataatttttattcaagaaaatgttctgacaaaattttaattatatgtcttcaaaaattacattttttactctagtaagtagatgtttttagttatctggcaatttatttctgaatttataccaatgtttgattgtcatggtacaaaatatatgacaccctttaacttttgctggagttgaaaggcattataatctttagcataaatggccatgactattttggaaagacatttaagacccaaagcaaacttttaaaagtatttgccacattttcccatgcctatttcataaattccaacttttttttttacaatttctggatttttaagacccatttcacattgcactaggatacagcagtccacagtagagtgctactctccttgaaatcaaatctgtcttccacttccggattattcaatttatgttaggacaaatcttgactagatcaacctgttttccatcagataattttaaaacaatgtgtaatcttgtttgtctacattctctccccagtttagctgtatttgaattactaaatgctttatcgtcaaactgtacctagtctaacttatttttcttttgctgtcgttttacaagcattttaaaattctaatattcatctctggtggtgtttaacacaaggttctcttattcaagtttcaatataaaagtttttggattatttgggtgctagtttcttgcttggttatctgttcgtttttttaagttgatttgtaatttccaaagagttatgcatacagcaataaaattattaatatgc

SEQ ID NO: 280 - DNA, 2873 bp, Artificial Sequence
  TMEFF2
agagggatgcgggcggcagagctcgagaggcggctgccgggctgcggggcgccttgactctccctccaccctgcctcctcgggctccactcgtctgcccctggactcccgtctcctcctgtcctccggcttcccagagctccctccttatggcagcagcttcccgcgtctccggcgcagcttctcagcggacgaccctctcgctccggggctgagcccagtccctggatgttgctgaaactctcgagatcatgcgcgggtttggctgctgcttccccgccgggtgccactgccaccgccgccgcctctgctgccgccgtccgcgggatgctcagtagcccgctgcccggcccccgcgatcctgtgttcctcggaagccgtttgctgctgcagagttgcacgaactagtcatggtgctgtgggagtccccgcggcagtgcagcagctggacactttgcgagggcttttgctggctgctgctgctgcccgtcatgctactcatcgtagcccgcccggtgaagctcgctgctttccctacctccttaagtgactgccaaacgcccaccggctggaattgctctggttatgatgacagagaaaatgatctcttcctctgtgacaccaacacctgtaaatttgatggggaatgtttaagaattggagacactgtgacttgcgtctgtcagttcaagtgcaacaatgactatgtgcctgtgtgtggctccaatggggagagctaccagaatgagtgttacctgcgacaggctgcatgcaaacagcagagtgagatacttgtggtgtcagaaggatcatgtgccacagatgcaggatcaggatctggagatggagtccatgaaggctctggagaaactagtcaaaaggagacatccacctgtgatatttgccagtttggtgcagaatgtgacgaagatgccgaggatgtctggtgtgtgtgtaatattgactgttctcaaaccaacttcaatcccctctgcgcttctgatgggaaatcttatgataatgcatgccaaatcaaagaagcatcgtgtcagaaacaggagaaaattgaagtcatgtctttgggtcgatgtcaagataacacaactacaactactaagtctgaagatgggcattatgcaagaacagattatgcagagaatgctaacaaattagaagaaagtgccagagaacaccacataccttgtccggaacattacaatggcttctgcatgcatgggaagtgtgagcattctatcaatatgcaggagccatcttgcaggtgtgatgctggttatactggacaacactgtgaaaaaaaggactacagtgttctatacgttgttcccggtcctgtacgatttcagtatgtcttaatcgcagctgtgattggaacaattcagattgctgtcatctgtgtggtggtcctctgcatcacaagggccaaactttaggtaatagcattggactgagatttgtaaactttccaaccttccaggaaatgccccagaagcaacagaattcacagacagaagcaaaatacagggcactacagttcagacaatacaacaagagcgtccacgaggttaatctaaagggagcatgtttcacagtggctggactaccgagagcttggactacacaatacagtattatagacaaaagaataagacaagagatctacacatgttgccttgcatttgtggtaatctacaccaatgaaaacatgtactacagctatatttgattatgtatggatatatttgaaatagtatacattgtcttgatgttttttctgtaatgtaaataaactatttatatcacacaatatagttttttctttcccatgtatttgttatatataataaatactcagtgatgagaaaaaattggcattcttaaatttgcggtatctcataactgtaaatataatcagactagtacaatctgtacagctaccaatatttcatgtttcttctcatcttgagacagcacattagttcgtacaggactcagtggctaggttttgaatgattccaagatcaagggaaatgatggttattggaaaagagaaaaaataatttactttatatcgagtgaggataaaatatttccgatctttgaatcatctctatttcatcaactttcttccctggtcttccattttcatccctagagcagaaaaatctctggcatataaactaaataaaagaagaaggggagggaaagtgttttataactcataaaggagagggaaagaaaatattggtttttattggggaagtagcttagaatcccccagttaagtgcatatatctgaacttactgaacaagttacatactaggtatacacagagtggcaaaatatattccatttaggtgggtggaattaccaggggaaaaatgtaataacaccactagatgtgaaacaccaaaatcgtgaattctcaaaagcaccatacaatatgtatagtatatagttctttgaaaagaagttagaatcacaaccaataccccatgaatagctttgtggctaatgcagcaccataatttgtaatggaactaagatgatgatgacgatatttcatgaaaacagagagatgttttgagcatatttatgtggtgaggtaagaaagaaaattaatcctatagcatctgaaagacctcactgggaagttggtatggatttttgtttgatttgtgcatacaaataggtatcacaacttgatctggaaaaaataagctgtgaaaattctcaaggaataagatgaaaataaatcaattattatcatttagctctgcaaagctttccatggctaacacagtaaatttaaataaagctctctttgtctccttcaaaaaaaaaaaaaaaaaaaa

SEQ ID NO: 281 - DNA, 7253 bp, Artificial Sequence
  THBS1
agccgctgcgcccgagctggcctgcgagttcagggctcctgtcgctctccaggagcaacctctactccggacgcacaggcattccccgcgcccctccagccctcgccgccctcgccaccgctcccggccgccgcgctccggtacacacaggatccctgctgggcaccaacagctccaccatggggctggcctggggactaggcgtcctgttcctgatgcatgtgtgtggcaccaaccgcattccagagtctggcggagacaacagcgtgtttgacatctttgaactcaccggggccgcccgcaaggggtctgggcgccgactggtgaagggccccgacccttccagcccagctttccgcatcgaggatgccaacctgatcccccctgtgcctgatgacaagttccaagacctggtggatgctgtgcgggcagaaaagggtttcctccttctggcatccctgaggcagatgaagaagacccggggcacgctgctggccctggagcggaaagaccactctggccaggtcttcagcgtggtgtccaatggcaaggcgggcaccctggacctcagcctgaccgtccaaggaaagcagcacgtggtgtctgtggaagaagctctcctggcaaccggccagtggaagagcatcaccctgtttgtgcaggaagacagggcccagctgtacatcgactgtgaaaagatggagaatgctgagttggacgtccccatccaaagcgtcttcaccagagacctggccagcatcgccagactccgcatcgcaaaggggggcgtcaatgacaatttccagggggtgctgcagaatgtgaggtttgtctttggaaccacaccagaagacatcctcaggaacaaaggctgctccagctctaccagtgtcctcctcacccttgacaacaacgtggtgaatggttccagccctgccatccgcactaactacattggccacaagacaaaggacttgcaagccatctgcggcatctcctgtgatgagctgtccagcatggtcctggaactcaggggcctgcgcaccattgtgaccacgctgcaggacagcatccgcaaagtgactgaagagaacaaagagttggccaatgagctgaggcggcctcccctatgctatcacaacggagttcagtacagaaataacgaggaatggactgttgatagctgcactgagtgtcactgtcagaactcagttaccatctgcaaaaaggtgtcctgccccatcatgccctgctccaatgccacagttcctgatggagaatgctgtcctcgctgttggcccagcgactctgcggacgatggctggtctccatggtccgagtggacctcctgttctacgagctgtggcaatggaattcagcagcgcggccgctcctgcgatagcctcaacaaccgatgtgagggctcctcggtccagacacggacctgccacattcaggagtgtgacaagagatttaaacaggatggtggctggagccactggtccccgtggtcatcttgttctgtgacatgtggtgatggtgtgatcacaaggatccggctctgcaactctcccagcccccagatgaacgggaaaccctgtgaaggcgaagcgcgggagaccaaagcctgcaagaaagacgcctgccccatcaatggaggctggggtccttggtcaccatgggacatctgttctgtcacctgtggaggaggggtacagaaacgtagtcgtctctgcaacaaccccacaccccagtttggaggcaaggactgcgttggtgatgtaacagaaaaccagatctgcaacaagcaggactgtccaattgatggatgcctgtccaatccctgctttgccggcgtgaagtgtactagctaccctgatggcagctggaaatgtggtgcttgtccccctggttacagtggaaatggcatccagtgcacagatgttgatgagtgcaaagaagtgcctgatgcctgcttcaaccacaatggagagcaccggtgtgagaacacggaccccggctacaactgcctgccctgccccccacgcttcaccggctcacagcccttcggccagggtgtcgaacatgccacggccaacaaacaggtgtgcaagccccgtaacccctgcacggatgggacccacgactgcaacaagaacgccaagtgcaactacctgggccactatagcgaccccatgtaccgctgcgagtgcaagcctggctacgctggcaatggcatcatctgcggggaggacacagacctggatggctggcccaatgagaacctggtgtgcgtggccaatgcgacttaccactgcaaaaaggataattgccccaaccttcccaactcagggcaggaagactatgacaaggatggaattggtgatgcctgtgatgatgacgatgacaatgataaaattccagatgacagggacaactgtccattccattacaacccagctcagtatgactatgacagagatgatgtgggagaccgctgtgacaactgtccctacaaccacaacccagatcaggcagacacagacaacaatggggaaggagacgcctgtgctgcagacattgatggagacggtatcctcaatgaacgggacaactgccagtacgtctacaatgtggaccagagagacactgatatggatggggttggagatcagtgtgacaattgccccttggaacacaatccggatcagctggactctgactcagaccgcattggagatacctgtgacaacaatcaggatattgatgaagatggccaccagaacaatctggacaactgtccctatgtgcccaatgccaaccaggctgaccatgacaaagatggcaagggagatgcctgtgaccacgatgatgacaacgatggcattcctgatgacaaggacaactgcagactcgtgcccaatcccgaccagaaggactctgacggcgatggtcgaggtgatgcctgcaaagatgattttgaccatgacagtgtgccagacatcgatgacatctgtcctgagaatgttgacatcagtgagaccgatttccgccgattccagatgattcctctggaccccaaagggacatcccaaaatgaccctaactgggttgtacgccatcagggtaaagaactcgtccagactgtcaactgtgatcctggactcgctgtaggttatgatgagtttaatgctgtggacttcagtggcaccttcttcatcaacaccgaaagggacgatgactatgctggatttgtctttggctaccagtccagcagccgcttttatgttgtgatgtggaagcaagtcacccagtcctactgggacaccaaccccacgagggctcagggatactcgggcctttctgtgaaagttgtaaactccaccacagggcctggcgagcacctgcggaacgccctgtggcacacaggaaacacccctggccaggtgcgcaccctgtggcatgaccctcgtcacataggctggaaagatttcaccgcctacagatggcgtctcagccacaggccaaagacgggtttcattagagtggtgatgtatgaagggaagaaaatcatggctgactcaggacccatctatgataaaacctatgctggtggtagactagggttgtttgtcttctctcaagaaatggtgttcttctctgacctgaaatacgaatgtagagatccctaatcatcaaattgttgattgaaagactgatcataaaccaatgctggtattgcaccttctggaactatgggcttgagaaaacccccaggatcacttctccttggcttccttcttttctgtgcttgcatcagtgtggactcctagaacgtgcgacctgcctcaagaaaatgcagttttcaaaaacagactcagcattcagcctccaatgaataagacatcttccaagcatataaacaattgctttggtttccttttgaaaaagcatctacttgcttcagttgggaaggtgcccattccactctgcctttgtcacagagcagggtgctattgtgaggccatctctgagcagtggactcaaaagcattttcaggcatgtcagagaagggaggactcactagaattagcaaacaaaaccaccctgacatcctccttcaggaacacggggagcagaggccaaagcactaaggggagggcgcatacccgagacgattgtatgaagaaaatatggaggaactgttacatgttcggtactaagtcattttcaggggattgaaagactattgctggatttcatgatgctgactggcgttagctgattaacccatgtaaataggcacttaaatagaagcaggaaagggagacaaagactggcttctggacttcctccctgatccccacccttactcatcacctgcagtggccagaattagggaatcagaatcaaaccagtgtaaggcagtgctggctgccattgcctggtcacattgaaattggtggcttcattctagatgtagcttgtgcagatgtagcaggaaaataggaaaacctaccatctcagtgagcaccagctgcctcccaaaggaggggcagccgtgcttatatttttatggttacaatggcacaaaattattatcaacctaactaaaacattccttttctcttttttcctgaattatcatggagttttctaattctctcttttggaatgtagattttttttaaatgctttacgatgtaaaatatttattttttacttattctggaagatctggctgaaggattattcatggaacaggaagaagcgtaaagactatccatgtcatctttgttgagagtcttcgtgactgtaagattgtaaatacagattatttattaactctgttctgcctggaaatttaggcttcatacggaaagtgtttgagagcaagtagttgacatttatcagcaaatctcttgcaagaacagcacaaggaaaatcagtctaataagctgctctgccccttgtgctcagagtggatgttatgggattctttttttctctgttttatcttttcaagtggaattagttggttatccatttgcaaatgttttaaattgcaaagaaagccatgaggtcttcaatactgttttaccccatcccttgtgcatatttccagggagaaggaaagcatatacacttttttctttcatttttccaaaagagaaaaaaatgacaaaaggtgaaacttacatacaaatattacctcatttgttgtgtgactgagtaaagaatttttggatcaagcggaaagagtttaagtgtctaacaaacttaaagctactgtagtacctaaaaagtcagtgttgtacatagcataaaaactctgcagagaagtattcccaataaggaaatagcattgaaatgttaaatacaatttctgaaagttatgttttttttctatcatctggtataccattgctttatttttataaattattttctcattgccattggaatagatatctcagattgtgtagatatgctatttaaataatttatcaggaaatactgcctgtagagttagtatttctatttttatataatgtttgcacactgaattgaagaattgttggttttttcttttttttgttttgtttttttttttttttttttttgcttttgacctcccatttttactatttgccaatacctttttctaggaatgtgcttttttttgtacacatttttatccattttacattctaaagcagtgtaagttgtatattactgtttcttatgtacaaggaacaacaataaatcatatggaaatttatatttatacttactgtatccatgcttatttgttctctactggctttatgtcatgaagtatatgcgtaaataccattcataaatcaatatagcatatacaaaaataaattacagtaagtcatagcaacattcacagtttgtatgtgattgagaaagactgagttgctcaggcctaggcttagaatttgctgcgtttgtggaataaaagaacaaaatgatacattagcctgccatatcaaaaacatataaaagagaaattatccctaagtcaagggcccccataagaataaaatttcttattaaggtcattagatgtcattgaatccttttcaaagtgcagtatgaaaacaaagggaaaaacactgaagcacacgcaactctcacagcgacattttctgacccacgaatgatgccttgggtgggcaacacgattgcatgttgtggagacacttcggaagtaaatgtggatgagggaggagctgtccttgcaatgttgagccaagcattacagatacctcctcttgaagaaggaataataagtttaatcaaaaaagaagactaaaaaatgtaaaatttggaaggaatccataaatgcgtgtgtgtctaaatacaaattatcatgtgaagaaaaggcccaagtgtaccaataagcagaccttgatttttggatgggctaattatgaatgtggaatactgaccagttaatttccagttttaatgaaaacagatcaaagaagaaattttatgagtaggttaaaggtctggctttgaggtctattaaacactagaaaggactggctgggtgagataaaatcttccttgttgattttcactctcattctataaatactcatctttctgagtagccatgatcacatacaaatgtaaattgccaaatcattttatagtaccaaggtgaagaagcaggaactagaaagtgttgataatagctgtggagttaggaaaactgatgtgaaggaaataattctttgaaatggcaaagaattaaataccatcattcattatcagaagagttcaacgtttgaagtgctgggagataattctaattcattcttggatagtgaagcaaaactgattgaaaataccaagataagacagaaaaagtgactggaaagaggagcttttcttccaggcatgttccagtttcaccctaagactgaccttcaaataatcaggttgtactgaaataaaggacttgttaaaaattaaaattatgtcatcgagatgatagcttttttcctcctccaacagtttattgtcatgtgttgtgggagagctcgagtgaagagcaataaactccaggtcttataagaatgtacatacaataaaggtggtgccagcagtttttttttttctaaagagtcacatgtagaaaagcctccagtattaagctcctgaattcattccttaaataaattggctctctctctcttctataaaaaaaaaaaaaa

SEQ ID NO: 282 - DNA, 5820 bp, Artificial Sequence
  SEPT11
gttgctctaataaagcgggaggggcggcggcgtggggggagcagatgccgctggctgccagcgggacgccggcgagcagagcgcagccgcgagggaggcgcgagggaggcgagccggagcccgagcactagcagcagccggagtcggcgtaaagcacccgggcgcagccggagccggtgccgcagctgcgatggccgtggccgtggggagaccgtctctcagaggcgtctgtactactgaaataggacctcagaaaaagacatgacctaagatgaagggtctacatcggtaaactctgcaaaactccagcagttacagagcctgtgctaggagctacagggtgaagagggggaagaagactcaagaaacctgtaaaactaatggaggagaggaaaccagctcatgtgctgagaagttttaaatatgctgcatttatgaatgaagagcttcgaaacttgtctttgtctggccatgtgggatttgacagcctccctgaccagctggtcaacaagtctacttctcaaggattctgtttcaacatcctttgtgttggtgagacaggcattggcaaatccacgttaatggacactttgttcaacaccaaatttgaaagtgacccagctactcacaatgaaccaggtgttcggttaaaagccagaagttatgagcttcaggaaagcaatgtacggctgaagttaaccattgttgacaccgtgggatttggagaccagataaataaagatgacagctataagccgatagtagaatatattgatgcccagttcgaggcctacctgcaagaggaattgaagattaaacgttctctcttcaactaccatgacacgaggatccatgcctgcctctactttattgcccctactggacattcactaaagtccctggatctggtcaccatgaaaaagctggacagtaaggtgaacatcattccaataattgcaaaagctgacaccattgccaagaatgaactgcacaaattcaagagtaagatcatgagtgaactggtcagcaatggggtccagatatatcagtttcccactgatgaagaaacggtggcagagattaacgcaacaatgagtgtccatctcccatttgcagtggttggcagcaccgaagaggtgaagattggcaacaagatggcaaaggccaggcagtacccctggggtgtggtgcaggttgagaatgaaaatcattgcgattttgtgaaacttcgagagatgctgatccgcgtgaacatggaggacttgcgagagcagactcacacccgccactatgaattgtaccgacgctgtaagcttgaagagatggggttcaaggacactgaccctgacagcaaacccttcagtcttcaggagacatatgaagcaaaaaggaatgaattcctgggagaactgcagaagaaagaagaagaaatgagacaaatgtttgttatgagagtgaaggagaaagaagctgaacttaaggaggcagagaaagagcttcacgagaagtttgaccttctaaagcggacacaccaagaagaaaagaagaaagtggaagacaagaagaaggagcttgaggaggaggtgaacaacttccagaagaagaaagcagcggctcagttactacagtcccaggcccagcaatctggggcccagcaaaccaagaaagacaaggataagaaaaatgcaagcttcacataaagcctggcaagccaaggatgttcccgcattcacctgcttttgcagtaatatcgtatctctgccatgtgtgttctttagttttattttattttattttatttttttacccttcctcaaacaccagtaactattattaactcgttttgctgaatgttgttgggtggtagaaaatgatagaacaagggaataaccgcgaatgctctgtgcagctggactctgtttccggaaagtaaatgatttgctttttatgcctgttctgaatggcagcacgaagcaggcctgttacttgtatgtcgctttggacagaggaaagtggggtaaaatgctacctgtacgtctgacatgaaaacttctcaccgcctcagcagctgaactaaaaacctgaatagccatgacaagagtttgcattttcttgatgattcatctccatgagtgcacaatccctgaactcactgtcttttctccacacttgtcctaagccaaggtagatttgtacgtagacagactggtgagcaagcattatattttatttttacccttgcatgacattttcattttaatcaataacattatttggcctgagcttgtgggtctgttcagactgtctcctctcatggtttgaaactgcatctgaatgcctgccttcaatcctggccaagttggagtagactggtatgagaaaactatgattagttcacatttactggtgcatccttgatcctctcacagatagaggtcttaaaggttggatcatgtaacattgcttagtagaagaatcttcttctaaggatgatgggctttctacagcctgcttaccactaacagtaaggaatctttcataaacacacctcagtttgttcccagtgggcttagagggaggacctgatgactgattccaggatacttgtacttctaataacatttttcatgaatcatgagaaaatttccacagatacttcccttagaaaatttgctataaactctgtatcattggtagcacaaatttgagcgaggccttgtcaattttaaggtggaaataggaaggaccacaacatgacccgtaagtcaagaaggtagacatttcatatccagcttccttgcttagtctcctttcagtatttggcaataaaagaaagaagaaatagaacagctgaagtctcaaatcattgtctggaattttcctcaccttggctagctccacctgctctttgtctaaggcccttgcctcatcagggattagaactggcccatatgccagaacctgtactaaatgcctaatttgtatggaagagtgcatatttaatctcttttctatactgctcctttctgatgcttatcctttcatctgtgtgattgttttttcccctctactaacaagatcctcccagctttctctctacatgtagaaaggataacatttctcatgaacccactgcccctctgcattttcctcactggttagagattaagtaaataggatagaatatgctgcgtctcccctgacacacactttcttttttgaatgagcaagtctccattttgatttcagcaaagattttttctccttttctttgtcctcaaccatacttagaggaaagaaggaatggtcttccatgaactgattatgcttaattaagcaaagtaaggaaattagtttcatggaagcctaaacaaagctggaatagaaactacacactagacacagcagtagtcatagtcttcacaggtttaggagctactggaccaacattcttgtttttgcttttgtttttttaaataattctagtctggagctaactgtggagcagccaaatagtagctggcatgttgattcaaaccatgggctgaatttgctcataggctgtgcatcagacaaaagcttgaatatttgtgttgtatgcttgttccaaccaccgcttgtgtgagcatttttgtggcttgtacagaaagtacacttttaaattgtctcttgcatcactaaaatttttttaaaatgagcataacaacgaaaggcatccagctgactttttgattccaagattattgattggattgacttttttgcattaaatttttcccagcaaaataaatcatatggcgagtcagggaataaaaagtcaaaagaaacaaatagaagcttttttttttaaaaaatgtattgcttctgaacttttttctgccactgctccctagccctgtttagtttgttattgctgcttttcttttttctttctgtatctatgcctttttttcacagtagtccttggctctgcacggaataaatgataccctcaaatctaattggatgtgctttcgcctttgcatgtaagtacggtagtaagaaacctttgagatctttctgacttttcaaaattagagaaagcaaatgggatggatagattttttttttcttttcaaggggggcaggaaggtaatggtttgagtagcctttgtttaaaaaaaagactaaatatatttaaaaggccacatttatatttttttcacaagaaccacataataaattccacttcttgacctgaatttggaaatccgaaattactaatccaggccaggtgtggtggctcatgcctgtaatcccagcactttgagaggccgaggtgggcagatcacttgaggcctggagttcaagaccaccttggcgaacacggtgaaaccccgtctctacaaaaaatacaaaaattagccaggcgtggtggcacgtgcctgtagtcccagctacttgggaggctaagtcaggagaattgcttgaacttgggagatggaggttgcagtgagccaagattgcaccactgcattccaacctgggtgatgaagtgagactctccaaaaaaaaaaaagaaattattaatccctgcctgtgctctacatagcctcatgggcatcattggatagctcagagggcccttgattctggcaaggcaaataaagccagaatgagaaattaccatcttctactagagaaaaccaagagaaaaatttttatgctaggatgcctttatgaccacttaattttttaatcttagtttaatggtctctccctggtgctaactgctgacagtggccacctcttttttggggattgaggggcctacataactagctggccttaccccatatcttttgttcaaacataataccatctttttgcttcttctgaactttagatctccataacacatgtactgtagaatgtgatggaaaagcattgatgagaatttattggcagttcagattgtgttttcccaacttaggctctttattaattggttaaggttttctccaaaaagggcatttcaacaatgggaattatttaatgtaacagtgggcacagattacttatcttccttctctgctttgtgactcaccagcagtaacacacacaatccacatcttgtgcacctcaaatgaacagacttggtttccttgctttcttgacatttccatgactgtttcacatacaaactattgggtgaggtttttcagctgttaccgacccacgtcctgctgtctctgtgtggtcctacaaaaactgtccattcccacccctttgctttgccatttgcaagagtctggaattgtcaggtctcagcttcgaaaagtcctggttccactgacaggacacattctttagtgggaattaagacctacaaagtctagtttgtatgtaggtatgaagggaattttttaaataaattgaaaagctgtgaacagcattagaactttgtctatttcttaattttaaaatatgctgatatgccttaaactgtagttgtagatccttgtcattttgctgtttgaaaataaccaatgtgttttctaaaactgtcgtgtaatctactttcattgttaatgcagaattgtcatatatgtaagctgcatgttagacatttgtcttttttaaactaaagtaattgtattgatgtgaagcatatcattttttcaaatatgaaagtgatcacttagcaacatgcttggtaatttggcatctgttaaggtaggagagtggtgaacagataatctatgcatatatcactagtgccaagacataaagcgggggaaaatatatttttacccaaacattaaaaaaaaaaaaaaaaaa

SEQ ID NO: 283 - DNA, 3224 bp, Artificial Sequence
  SERPINB13
aaagttccaaggagattttaaggtgcacgcaaggtggaaaaccactgctgaagcagatgtggagaactataaattaaggatcccagctacttaattgacttatgcttcctagttcgttgcccagccaccaccgtctctccaaaaacccgaggtctcgctaaaatcatcatggattcacttggcgccgtcagcactcgacttgggtttgatcttttcaaagagctgaagaaaacaaatgatggcaacatcttcttttcccctgtgggcatcttgactgcaattggcatggtcctcctggggacccgaggagccaccgcttcccagttggaggaggtgtttcactctgaaaaagagacgaagagctcaagaataaaggctgaagaaaaagaggtggtaagaataaaggctgaaggaaaagagattgagaacacagaagcagtacatcaacaattccaaaagtttttgactgaaataagcaaactcactaatgattatgaactgaacataaccaacaggctgtttggagaaaaaacatacctcttccttcaaaaatacttagattatgttgaaaaatattatcatgcatctctggaacctgttgattttgtaaatgcagccgatgaaagtcgaaagaagattaattcctgggttgaaagcaaaacaaatgaaaaaatcaaggacttgttcccagatggctctattagtagctctaccaagctggtgctggtgaacatggtttattttaaagggcaatgggacagggagtttaagaaagaaaatactaaggaagagaaattttggatgaataagagcacaagtaaatctgtacagatgatgacacagagccattcctttagcttcactttcctggaggacttgcaggccaaaattctagggattccatataaaaacaacgacctaagcatgtttgtgcttctgcccaacgacatcgatggcctggagaagataatagataaaataagtcctgagaaattggtagagtggactagtccagggcatatggaagaaagaaaggtgaatctgcacttgccccggtttgaggtggaggacggttacgatctagaggcggtcctggctgccatggggatgggcgatgccttcagtgagcacaaagccgactactcgggaatgtcgtcaggctccgggttgtacgcccagaagttcctgcacagttcctttgtggcagtaactgaggaaggcaccgaggctgcagctgccaccggcataggctttactgtcacatccgccccaggtcatgaaaatgttcactgcaatcatcccttcctgttcttcatcaggcacaatgaatccaacagcatcctcttcttcggcagattttcttctccttaagatgatcgttgccatggcattgctgcttttagcaaaaaacaactaccagtgttactcatatgattatgaaaatcgtccattcttttaaatgttgtctcacttgcatttccagtcttggccatcaaatcaatgatttaatgactccaataatgtgtgtgtttataaccatcctcgaaagtgaaatgtccttttctttgtgccatgcgtaaggtgagtcaaaccaaacctcattgataatctccctttggtttcctttgaaagtaaattggtatcttgtagttttgtgcacacgaaaggagagaaagtctctccagtaaagagtacgaactagtaattttggggggtctctctaattctggtattttgacatgttataatacgcaagtaaaataaaacaatagtttactcagctcatgttactattccccaacagatattgtggcaaatcacacataggaaagagaatttgggaatacagtagcaaaacataaattaaaactcaaatgccaggacaaaataaaacaatataccagatggagaggatgcccgtattttcatcttccattctaacattatccattgttagatgcataagcattttgatattgtgtaataaatgtggtatttgagaagataaatgatgtagttgatcagtattcctcctctatcacctttttagactttgtaaggtaaatatttggactaacttttagaaaagtttccctttttttctccatttacatttttctggtttttttttttttttgagtgaggtacgagtattaccaaatgatattttctgaagatgctttttggaaagctctgaatctatacctaatgctcttaattattggcttgtttcatttttttcctccagtttttaacaagatcacataactggcttatttttaacagctttgtcaaactacaatttacatgccgtaaaatgtacacactgtaattttataattcattgacttttagtaaatttctagcgttatgcatcgccacaatccagttttagaatatttccatgaccctaagaagtttcctcatgtctattaatattcccaatcctaggcaccactgagttgttttctgtctttataagtttttctttctacatcttatataaatggaatcataatacatgtagtattttgtgtctggcgtcttgcacttagcatggtgttcttgaggttcatctgttgtagtatgtattgatacttaatttttttattgccgaatactattccattgcatggaaaagacctattttatttctaggttcaccagttgagggacatttggattgttcccacttcttggctgttaggaataatgttgctctgaacatgtaaataaagatctttgtgttcacatatgttttcatttctgttggggagattcctaggctagaaattgctgggccatatgaaaaatcaatagttagctttgtaagaaacagtcaaactgttttccaacgtgacattttatattcccaccaggaatgtttaaaactagtgtcttcaaatcctcaccaacatccaggattgtgtctttatgattatagccatttttgtaggtacaaagtggcatctcatggtggttttaatttgcatttccataatatctaattaggttgagctttttttatgtgcttattggccatttgtttgactttgtttggtgaaatgtatacaaatcatttgctcatttttaatttgggttgtctgtcttgtcttctcattttattgagttaaatgagttcttaataatctctggcttacaagtccttaatttatcaaatatatgatacgtggacatttcctcataaaaaaaaaaaaaaaaaa

SEQ ID NO: 284 - DNA, 2551 bp, Artificial Sequence
  EED
cgctttgaaatccaccctgggattcggaaaccgggtagaaaactacctggttcagcaaacgagaattcaaacagaggaggggcttggaggaggcgggtttcgacgaacccagcgcaagagtacgccacggcgcctgcgcatcccctgacgggtactttccattcgccagatgggggaagccagggggaagcaggttactgtttttgcatttctatcttcaaggaagaattaggttatgaatagttccgtgaatagtcaggaagcgctgtcctccaagttcaagattaaggaaacgtggcatgcacagctaaagcaagaggtgacgtcttgtatcttcccccgtttcctgggacattggtggtgtagcccattccacagactttcgctccctagcagcgggtcggagatcgaaggaacgggccaattgcggctgaaacgtctttggaaggaggaagggggtgagggagcatccctttgagtttcgcctcttctcgaggcggtggtgggaagggagacatacttaatactgccctcttaatccaacggaccttacatcgtgtagactgccgggagggcggcgggaaaagggcaagacgggagttggggaagggaaggagccaggaagccgcgcgggagggcgcgcgcgcgcgcccctttttcagcagtgtggcggggtcgcacgcacgcccgcctcggcggctgggcgcgatttgcgacagtggggggggcggtggaggtggcggcggcagcggcaactttgcggcaagctcgggccgggcttgcttgacggcggtgtggcggaggccccgccccaggcggcaggaacctggagggaggcggaggaatatgtccgagagggaagtgtcgactgcgccggcgggaacagacatgcctgcggccaagaagcagaagctgagcagtgacgagaacagcaatccagacctctctggagacgagaatgatgacgctgtcagtatagaaagtggtacaaacactgaacgccctgatacacctacaaacacgccaaatgcacctggaaggaaaagttggggaaagggaaaatggaagtcaaagaaatgcaaatattctttcaaatgtgtaaatagtctcaaggaagatcataaccaaccattgtttggagttcagtttaactggcacagtaaagaaggagatccattagtgtttgcaactgtaggaagcaacagagttaccttgtatgaatgtcattcacaaggagaaatccggttgttgcaatcttacgtggatgctgatgctgatgaaaacttttacacttgtgcatggacctatgatagcaatacgagccatcctctgctggctgtagctggatctagaggcataattaggataataaatcctataacaatgcagtgtataaagcactatgttggccatggaaatgctatcaatgagctgaaattccatccaagagatccaaatcttctcctgtcagtaagtaaagatcatgctttacgattatggaatatccagacggacactctggtggcaatatttggaggcgtagaagggcacagagatgaagttctaagtgctgattatgatcttttgggtgaaaaaataatgtcctgtggtatggatcattctcttaaactttggaggatcaattcaaagagaatgatgaatgcaattaaggaatcttatgattataatccaaataaaactaacaggccatttatttctcagaaaatccattttcctgatttttctaccagagacatacataggaattatgttgattgtgtgcgatggttaggcgatttgatactttctaagagtggccgtgccattttacattcccaccagcaatgtatgagagatccagtgtctccgaatcttcgccagcatttgtcttgtgaaaatgccattgtgtgctggaaacctggcaagatggaagatgatatagataaaattaaacccagtgaatctaatgtgactattcttgggcgatttgattacagccagtgtgacatttggtacatgaggttttctatggatttctggcaaaagatgcttgcattgggcaatcaagttggcaaactttatgtttgggatttagaagtagaagatcctcataaagccaaatgtacaacactgactcatcataaatgtggtgctgctattcgacaaaccagttttagcagggatagcagcattcttatagctgtttgtgatgatgccagtatttggcgctgggatcgacttcgataaaatacttttgcctaatcaaaattagagtgtgtttgttgtctgtgtaaaatagaattaatgtatcttgctagtaagggcacgtagagcatttagagttgtctttcagcattcaatcaggctgagctgaatgtagtgatgtttacattgtttacattctttgtactgtcttcctgctcagactctactgcttttaataaaaatttatttttgtaaagctgtgtgtttagttactttcattgtggtgaaaaaaagttaaaagtaataaaattatgccttatctttttaaaaaaaaaaaaaaaaaaaa

SEQ ID NO: 285 - DNA, 1612 bp, Artificial Sequence
  LGI1
gaaagcagaaagctgtttattttctgtgacatcacttcactttgccttcgaaggctggtctgtgctcagtgttttcgtggtgatgcaagtcggctctctcctccagcagttggatccctcccatctcacagtacctcacaggtctcttcccccgagcagtgcattgctggagcgaggagaagctcacgaatcagctgcaggtctctgttttgaaaaagcagagatacagaggcagaggaaaagggtggactcctatgtgacctgttcttagagcaagacaatcaccatctgaattccagaagccctgttcatggttggggatattttctcgactgcatggaatcagaaagaagcaaaaggatgggaaatgcctgcattcccctgaaaagaattgcttatttcctatgtctcttatctgcgcttttgctgactgaggggaagaaaccagcgaagccaaaatgccctgccgtgtgtacttgtaccaaagataatgctttatgtgagaatgccagatccattccacgcaccgttcctcctgatgttatctcattatcctttgtgagatctggttttactgaaatctcagaagggagttttttattcacgccatcgctgcagctcttgttattcacatcgaactcctttgatgtgatcagtgatgatgcttttattggtcttccacatctagagtatttattcatagaaaacaacaacatcaagtcaatttcaagacatactttccggggactaaagtcattaattcacttgagccttgcaaacaacaatctccagacactcccaaaagatattttcaaaggcctggattctttaacaaatgtggacctgaggggtaattcatttaattgtgactgtaaactgaaatggctagtggaatggcttggccacaccaatgcaactgttgaagacatctactgcgaaggccccccagaatacaagaagcgcaaaatcaatagtctctcctcgaaggatttcgattgcatcattacagaatttgcaaagtctcaagacctgccttatcaatcattgtccatagacactttttcttatttgaatgatgagtatgtagtcatcgctcagccttttactggaaaatgcattttccttgaatgggaccatgtggaaaagaccttccggaattatgacaacattacagttttaagggaaatacacagatttacaaacatgtcatagttgacttaagcgcatgagacaccaaattctgtggctgccatcagaaattttctacagtacatgacccggatgaactcaatgcatgatgactcttcttatcacacttgcaaatgaatgcctttcaaacattgagactgctagaaccaagcactaccagtatctccatccttaactgtccagtccagtgatgtgggaagttaccttttataagacaaaatttaattgtgtaactgttctttgcagtgaagatgtgtaaataagcgtttaatggtatctgttactccaaaaagaaatattaatatgtacttttccatttatttattcatgtgtacagaaacaactgccaaataaaatgtttacattttctttcatatcccagaggtaattaaaaaaaaaaaaa

SEQ ID NO: 286 - DNA, 2346 bp, Artificial Sequence
  ADAM32
agtggctccagcaaccacgcggctggggtgcgccgggaagggagctggatgttttagcctcggggcgcacgctgcgggcccttcgtgttccggacgctaaacaccgagagcaccccgtctccggggcctccggagaacgctgtcccatgaacgtgcggggagcggcccccggcgtccgcgcgtccccgcgtccctggcaattcccgacttcccaacggcttcccgctggcagccccgaagccgcaccatgttccgcctctggttgctgctggccgggctctgcggcctcctggcgtcaagacccggaacaaatatcctatattattccaatagatgagaaactgtacactgtgcaccttaaacaaagatattttttagcagataattttatgatctatttgtacaatcaaggatctatgaatacttattcttcagatattcagactcaatgctactatcaaggaaatattgaaggatatccagattccatggtcacactcagcacgtgctctggactaagaggaatactgcaatttgaaaatgtttcttatggaattgagcctctggaatctgcagttgaatttcagcatgttctttacaaattaaagaatgaagacaatgatattgcaatttttattgacagaagcctgaaagaacaaccaatggatgacaacatttttataagtgaaaaatcagaaccagctgttccagatttatttcctctttatctagaaatgcatattgtggtggacaaaactttgtatgattactggggctctgatagcatgatagtaacaaataaagtcatcgaaattgttggccttgcaaattcaatgttcacccaatttaaagttactattgtgctgtcatcattggagttatggtcagatgaaaataagatttctacagttggtgaggcagatgaattattgcaaaaatttttagaatggaaacaatcttatcttaacctaaggcctcatgatattgcatatctactaatttatatggattatcctcgttatttgggagcagtgtttcctggaacaatgtgtattactcgttattctgcaggagttgcattgcaatgtggacctgcaagctgttgtgattttcgaacttgtgtactgaaagacggagcaaaatgttataaaggactgtgctgcaaagactgtcaaattttacaatcaggcgttgaatgtaggccgaaagcacatcctgaatgtgacatcgctgaaaattgtaatggaagctcaccagaatgtggtcctgacataactttaatcaatggactttcatgcaaaaataataagtttatttgttatgacggagactgccatgatctcgatgcacgttgtgagagtgtatttggaaaaggttcaagaaatgctccatttgcctgctatgaagaaatacaatctcaatcagacagatttgggaactgtggtagggatagaaataacaaatatgtgttctgtggatggaggaatcttatatgtggaagattagtttgtacctaccctactcgaaagcctttccatcaagaaaatggtgatgtgatttatgctttcgtacgagattctgtatgcataactgtagactacaaattgcctcgaacagttccagatccactggctgtcaaaaatggctctcagtgtgatattgggagggtttgtgtaaatcgtgaatgtgtagaatcaaggataattaaggcttcagcacatgtttgttcacaacagtgttctggacatggagtgtgtgattccagaaacaagtgccattgttcgccaggctataagcctccaaactgccaaatacgttccaaaggattttccatatttcctgaggaagatatgggttcaatcatggaaagagcatctgggaagactgaaaacacctggcttctaggtttcctcattgctcttcctattctcattgtaacaaccgcaatagttttggcaaggaaacagttgaaaaagtggttcgccaaggaagaggaattcccaagtagcgaatctaaatcggaaggtagcacacagacatatgccagccaatccagctcagaaggcagcactcagacatatgccagccaaaccagatcagaaagcagcagtcaagctgatactagcaaatccaaatcagaagatagtgctgaagcatatactagcagatccaaatcacaggacagtacccaaacacaaagcagtagtaactagtgattccttcagaaggcaacggataacatcgagagtctcgctaagaaatgaaaattctgtctttccttccgtggtcacagctgaaagaaacaataaattgagtgtggatcaatttgcaaaaaaaaaaaaaaaa

SEQ ID NO: 287 - DNA, 4379 bp, Artificial Sequence
  DCN
aaatgctacttgtaaacaaggctagaaagggtggagaatgaaatgagatggggggtggggaaacaaaccctttagttacaatatcttagggaaatgaatctacaataagacaaatttcaaatcaagttgctccactatactgcataagcagtttagaatcttaagcagatgcaaaaagaataaagcaaatgggaggaaaaaaaaggccgataaagtttctggctacaatacaagagacatatcattaccatatgatctaatgtgggtgtcagccggattgtgttcattgagggaaaccttattttttaactgtgctatggagtagaagcaggaggttttcaacctagtcacagagcagcacctaccccctcctcctttccacacctgcaaactcttttacttgggctgaatatttagtgtaattacatctcagctttgagggctcctgtggcaaattcccggattaaaaggttccctggttgtgaaaatacatgagataaatcatgaaggccactatcatcctccttctgcttgcacaagtttcctgggctggaccgtttcaacagagaggcttatttgactttatgctagaagatgaggcttctgggataggcccagaagttcctgatgaccgcgacttcgagccctccctaggcccagtgtgccccttccgctgtcaatgccatcttcgagtggtccagtgttctgatttgggtctggacaaagtgccaaaggatcttccccctgacacaactctgctagacctgcaaaacaacaaaataaccgaaatcaaagatggagactttaagaacctgaagaaccttcacgcattgattcttgtcaacaataaaattagcaaagttagtcctggagcatttacacctttggtgaagttggaacgactttatctgtccaagaatcagctgaaggaattgccagaaaaaatgcccaaaactcttcaggagctgcgtgcccatgagaatgagatcaccaaagtgcgaaaagttactttcaatggactgaaccagatgattgtcatagaactgggcaccaatccgctgaagagctcaggaattgaaaatggggctttccagggaatgaagaagctctcctacatccgcattgctgataccaatatcaccagcattcctcaaggtcttcctccttcccttacggaattacatcttgatggcaacaaaatcagcagagttgatgcagctagcctgaaaggactgaataatttggctaagttgggattgagtttcaacagcatctctgctgttgacaatggctctctggccaacacgcctcatctgagggagcttcacttggacaacaacaagcttaccagagtacctggtgggctggcagagcataagtacatccaggttgtctaccttcataacaacaatatctctgtagttggatcaagtgacttctgcccacctggacacaacaccaaaaaggcttcttattcgggtgtgagtcttttcagcaacccggtccagtactgggagatacagccatccaccttcagatgtgtctacgtgcgctctgccattcaactcggaaactataagtaattctcaagaaagccctcatttttataacctggcaaaatcttgttaatgtcattgctaaaaaataaataaaagctagatactggaaacctaactgcaatgtggatgttttacccacatgacttattatgcataaagccaaatttccagtttaagtaattgcctacaataaaaagaaattttgcctgccattttcagaatcatcttttgaagctttctgttgatgttaactgagctactagagatattcttatttcactaaatgtaaaatttggagtaaatatatatgtcaatatttagtaaagcttttcttttttaatttccaggaaaaaataaaaagagtatgagtcttctgtaattcattgagcagttagctcatttgagataaagtcaaatgccaaacactagctctgtattaatccccatcattactggtaaagcctcatttgaatgtgtgaattcaatacaggctatgtaaaatttttactaatgtcattattttgaaaaaataaatttaaaaatacattcaaaattactattgtatacaagcttaattgttaatattccctaaacacaattttatgaagggagaagacattggtttgttgacaataacagtacatcttttcaagttctcagctatttcttctacctctccctatcttacatttgagtatggtaacttatgtcatctatgttgaatgtaagcttataaagcacaaagcatacatttcctgactggtctagagaactgatgtttcaatttacccctctgctaaataaatattaaaactatcatgtgacttcatgtaatcaggctgaacatttctacaattactagatgtattagacgtaagtattttctttagttaaaccacccatgttagaaatgttttctgtagaatttataaacaactatcaatgcagacaatttaataagcctggggatgatttacttacagtaaacatttatcaaattgtacatttgtgctatcaacaattaataagcaaatatgtgaaaatagtttctgtcttctatgaagttagatatttgatggttaaaacccctataaatcatagtttcatatgggaaaaaataattgaaatacagtgtaaatttaaataatttattaagtatagcaaataattgaaatatggtggactaaattttgtcatagaaatatgtgcaagttatagtagtggctcacatgagaggtaatcaattctgctaatagtagcagaatgagtgcagtggaacatgaaaaacttgaggagataacagttgaggtgggtttccatagatgcataatagttcaagagcaagatttggtggggaggcactattcaagacagggactaagttcaaaatccaagacgtatgctgggacacacctctgacaggttggcataaaggaggcttaatcaaactatttttcttcttctgaaacagaagcaataattttcatttacatttgacatatcccgaggtaatattaacattagggaaagttactcttttccatctttccacattcttgcaggaccataaaatctgaattttccagtatttttaataagagggaagaaacctctctttttcttctctttttcatctcccaagagatcctcctctcatgactacagttgaataggtggtttctattggaagacattcaggaattcaaggtgcatgtccataaatggactttttttgttgttgttcagagctggaccttgaatgatgcatccttctctctgttgtaaccatgaataatgcacccttcatgctatagcctttaacgattcacccttcttattgtaaccttgaatgattcaccctttatggtgtagccttgagtgacgcacccttcatgttgtagccttcaatgatgcacactccatgttatagccttgaatgatataccctttatgctgcagcctttctcttatggggaaaagcctgcagatatcctgctgcttaactgacaagtgtggtgagaaataagtagaaatctaaagaggggaagaccattttggacacttatctgcaaggcagatccaacacacttttccagtagtcaagctacttctaattttgttcagtatcaaaatgagaaacaggcctgattctccagcactcttgtcaacacaacttccccccatatttatatatatacacacacatatatatctttatatatatacacacatatatatctttatatatatatatttatatatatatctttttgcatatatacatatatatgtatctttatttcctttgaaataaagataaatatagctgatttctttggcttcgacacttactatttgcatgactaagggaagctagttaacctttctgtgactcatttccttgtccataaaatgggaatattaattgtacatgtcttatggattggtgtgtgaattcagttagcgagtgtagaatataacttatagatcaaagtagagtaaatggaaagggctcaactatggtgttgctactgccattgttattacaggcacacagttcgagctataatcatttcaagggaaattcttatgtgtcagttctggatcgaggtctgagattctgcatttcaaacaaacttccaggaatgctgctgcttcttggtccacacttggagaaataagtcagcagagagtcctctcgtttcctattgtaccatgtctgtcttttgtctcctgcttattggcctctgtaaggaactcacagctgctataataaagtaccaaaaactgggtggcttaaaacaaaaaaaaaaaaaaaaa

SEQ ID NO: 288 - DNA, 2648 bp, Artificial Sequence
  CPE
gcccgtctctccgccggccccctcctcgcagtggtttctcctgcagctcccctgggctccgcggccagtagtgcagcccgtggagccgcggctttgcccgtctcctctgggtggccccagtgcgcgggctgacactcattcagccggggaaggtgaggcgagtagaggctggtgcggaacttgccgcccccagcagcgccggcgggctaagcccagggccgggcagacaaaagaggccgcccgcgtaggaaggcacggccggcggcggcggagcgcagcgatggccgggcgagggggcagcgcgctgctggctctgtgcggggcactggctgcctgcgggtggctcctgggcgccgaagcccaggagcccggggcgcccgcggcgggcatgaggcggcgccggcggctgcagcaagaggacggcatctccttcgagtaccaccgctaccccgagctgcgcgaggcgctcgtgtccgtgtggctgcagtgcaccgccatcagcaggatttacacggtggggcgcagcttcgagggccgggagctcctggtcatcgagctgtccgacaaccctggcgtccatgagcctggtgagcctgaatttaaatacattgggaatatgcatgggaatgaggctgttggacgagaactgctcattttcttggcccagtacctatgcaacgaataccagaaggggaacgagacaattgtcaacctgatccacagtacccgcattcacatcatgccttccctgaacccagatggctttgagaaggcagcgtctcagcctggtgaactcaaggactggtttgtgggtcgaagcaatgcccagggaatagatctgaaccggaactttccagacctggataggatagtgtacgtgaatgagaaagaaggtggtccaaataatcatctgttgaaaaatatgaagaaaattgtggatcaaaacacaaagcttgctcctgagaccaaggctgtcattcattggattatggatattccttttgtgctttctgccaatctccatggaggagaccttgtggccaattatccatatgatgagacgcggagtggtagtgctcacgaatacagctcctccccagatgacgccattttccaaagcttggcccgggcatactcttctttcaacccggccatgtctgaccccaatcggccaccatgtcgcaagaatgatgatgacagcagctttgtagatggaaccaccaacggtggtgcttggtacagcgtacctggagggatgcaagacttcaattaccttagcagcaactgttttgagatcaccgtggagcttagctgtgagaagttcccacctgaagagactctgaagacctactgggaggataacaaaaactccctcattagctaccttgagcagatacaccgaggagttaaaggatttgtccgagaccttcaaggtaacccaattgcgaatgccaccatctccgtggaaggaatagaccacgatgttacatccgcaaaggatggtgattactggagattgcttatacctggaaactataaacttacagcctcagctccaggctatctggcaataacaaagaaagtggcagttccttacagccctgctgctggggttgattttgaactggagtcattttctgaaaggaaagaagaggagaaggaagaattgatggaatggtggaaaatgatgtcagaaactttaaatttttaaaaaggcttctagttagctgctttaaatctatctatataatgtagtatgatgtaatgtggtcttttttttagattttgtgcagttaatacttaacattgatttattttttaatcatttaaatattaatcaactttccttaaaataaatagcctcttaggtaaaaatataagaacttgatatatttcattctcttatatagtattcattttcctacctatattacacaaaaaagtatagaaaagatttaagtaattttgccatcctaggcttaaatgcaatattcctggtattatttacaatgcagaattttttgagtaattctagctttcaaaaattagtgaagttcttttactgtaattggtgacaatgtcacataatgaatgctattgaaaaggttaacagatacagctcggagttgtgagcactctactgcaagacttaaatagttcagtataaattgtcgtttttttcttgtgctgactaactataagcatgatcttgttaatgcatttttgatgggaagaaaaggtacatgtttacaaagaggttttatgaaaagaataaaaattgacttcttgcttgtacatataggagcaatactattatattatgtagtccgttaacactacttaaaagtttagggttttctcttggttgtagagtggcccagaattgcattctgaatgaataaaggttaaaaaaaaatccccagtgcatgtatttcagttctctaagatttttggtctggcattgtggtcttatgatgaaaacatgtatcctcttaatggcggcttctcatatattcatcctgtacattttaaaatttgttaagcaactactgtgtgctaagcactgcatagcctctatgtatgttattgtggcaggcaaaaggttctgattttgggcacaacctttatataaataacacaaaaattaa

SEQ ID NO: 289 - DNA, 9508 bp, Artificial Sequence
  LSAMP
ggaggagggggagagaggctctgggttgctgctgcttctgctgctgctgctgctgtgtggctgtttctgtacactcactggcaggcttggtgccggctccctcgcccgcccgcccgccagcctgggaaagtgggttacagagcgaaggagctcagctcagacactggcagaggagcatccagtcacagagagaccaaacaagaaccctttcctttggcttcctcttcagctcttccagagggcttgctatttgcactctctcttttgaaattgtgttgcttttacttttcacccttctgcttgggttttatgagggctttgttaagtcttagagggaaaagagactgagcgagggaaagagagaggcaaagtggaaaggaccataaactggcaaagcccgctctgcgctcgctgtggatgaaagccccgtgttggtgaagcctctcctcgcgagcagcgcgcacccctccagagcaccccgcggacccgcacctcggcgtggccaccatggtcaggagagttcagccggatcggaaacagttgccactggtcctactgagattgctctgccttcttcccacaggactgcctgttcgcagcgtggattttaaccgaggcacggacaacatcaccgtgaggcagggggacacagccatcctcaggtgcgttgtagaagacaagaactcaaaggtggcctggttgaaccgttctggcatcatttttgctggacatgacaagtggtctctggacccacgggttgagctggagaaacgccattctctggaatacagcctccgaatccagaaggtggatgtctatgatgagggttcctacacttgctcagttcagacacagcatgagcccaagacctcccaagtttacttgatcgtacaagtcccaccaaagatctccaatatctcctcggatgtcactgtgaatgagggcagcaacgtgactctggtctgcatggccaatggccgtcctgaacctgttatcacctggagacaccttacaccaactggaagggaatttgaaggagaagaagaatatctggagatccttggcatcaccagggagcagtcaggcaaatatgagtgcaaagctgccaacgaggtctcctcggcggatgtcaaacaagtcaaggtcactgtgaactatcctcccactatcacagaatccaagagcaatgaagccaccacaggacgacaagcttcactcaaatgtgaggcctcggcagtgcctgcacctgactttgagtggtaccgggatgacactaggataaatagtgccaatggccttgagattaagagcacggagggccagtcttccctgacggtgaccaacgtcactgaggagcactacggcaactacacctgtgtggctgccaacaagctgggggtcaccaatgccagcctagtccttttcagacctgggtcggtgagaggaataaatggatccatcagtctggccgtaccactgtggctgctggcagcatctctgctctgccttctcagcaaatgttaatagaataaaaatttaaaaataatttaaaaaacacacaaaaatgcgtcacacagaatacagagagagagagacagagagagagagagagagagagatgggggagaccgtttatttcacaactttgtgtgtttatacatgaagggggaaataagaaagtgaagaagaaaatacaacatttaaaacaattttacagtccatcattaaaaatttatgtatcattcaggatggagaaggttctactgggatatgtttatatctactaagcaaatgtatgctgtgtaaagactacaccacactaaggacatctggatgctgtaaaaataagagaagaaccagatggatattaagccccccaacacacactttatccttccttccttcatcttttttcatctgtggggaagaaaataaggtcttgcctttggtgtttatatttccataaccttttaattctatttttcatttgagctgacttgtagccacttcagactatcaatggaatcttatgttgagcctttctctggctttccttcctccactatctctccaactttagagatcatcccctctccctccagtgcgttctatctcccccacacccaccctagatactcccttttcacccacctttcctccctcacctctcctcacctccaccccctccccagagcactagtcatgccgcaaatgctaggaagtgccattttcattttctccactgtgcgtgtgtgctcaagtctttcgctctcacgtgggtgtacatgtgtgtgagcgtgtgtgtgtctctctctaaagcatgccaagggaatggtccatgtgtacatagactcattgtgctgtagatactgtcctgcattgtaattgtgagatgcggctgtaacaagttgctgggggagatggcggggaaagaggcaaggagcagagtcctccctacatccatggctgtcacatggcatcagtgtgtattcaaaccaagctatgctccttccaagggcaggaccccatattcctcctagtcccatcatcagaaccgagtggggagtcactcagaatatcactgtaaatgaaagtgcctactatcgatggggtaagcaaacagcataaggaattatgacgtggacgaggtgacctaggagagaaaatttcagattttactctcatttcatgagtctgagggattcttatatttcctggcatttaacagggtaggccctgctccactgtgaaaatgagcagcatgtgttgagtaaatccccagaaacaggaaggtctccaagtgtcaactcccagtgaaagaatgatgaaccacttggagatcctaagcagccctgttttacctcctccctaatcttaaataacatttgtcccatgaattcccctgagcagagattgtttcctatttcagataaaatacagtgaaagtgagcaaggcagaaaaagtcaacagatgcccaggctcctactgtattctggagatactgtcagagctctaatacagagcactggccataatgaaaagcagttcactccttgtgctcctctgcagatgtttttcccagtgttctaggttaatgttttatttggttgcctgcataatccctgttctgtttcactgatggtgtttgcagcaccactgttcatggtggtccactgttatcctatgccagggtgctaagaattgcatgatattcatcttccctgctctatttaaatttacatctataagagtcatcttgacattaacactgaaatgtgatctaggtccttaaccaaaattgctgggcaacttgtaataaatttagacagaaattttatgagtaccacaaagcttggtgttaccacatcaccagaaggatttcttaggaaatgtcttgccgagagagctggctctctgcatatagatgtctttgtcagaaaaccaacccttgctctcacttacacagtagtaagcactgaaagtggttcagttcatgagaggacagagaattattttgagattatatttgaatgtaatcttgcagagccaaatatggtatgtcattaagttggaaccttgtaaatagctgttccatgttataaaatgagaaactttgtaactggaaaaaaagaaaggaaagaaggaaggaaggaaggaaggaaggcagggagggggggacggggaagggggggagggagggagggagggagggagggagggagggagggaggaaggaaggaaggaaggaaggaaggagaaaggaaaggaaggcaggagggagaaagatctaagtagcattgttaatttcttcaatttcttctaagggattttattgtttgttttagaagcttatcacagccttctttcatgattttgcagtttagacttgatacaaggaaaaattcagcttggggatggttaagagtgtttatagcagattctgacataggagagaaaacaaattctcatccaagaaggtagctagtaaaatatagggaaggtgagccatattcctatgcagcatcaatttattgacaatcaggtatttctcttaacagtttggtcttcttagttcaagaataaagggtatcatctttaataataagcattccccaaaaattgaagaggcagtcacacacttaagtgtgtggctttagaaaagcgcatgctaatttaaagatatacaggaagagaaaagtaggagttaagttggatgttgttagaagttggatgttagtattaccttcaggaacagatccccatggcatgtcacaggccttaattatatacctggctttcttattgtctccactttatcatgaggacaaggtcttggtttcatgggaggaacttctccattgaaataaatgtctgccatgtcagcaccgtttgttccctcagttttaatataatggaccatatattaaacataattaaacatatatttaaatgtggtgtttgcctgtgtctctagcaggatcttgaaattttaaaaatttgcttctggttcctgtttcagagaaaacattgtccccagaaatttcataggattgaaagtgttccctaagcagtgtgaacaatggaggaaaatatagtttagagaaaagtcagggaaaggtagggccagaggactgacaccaagaaatcattgaatctcaacataagacttcttggaatttagttaatcatattggaataaattccttcaagaatcttgtcccttggtaatcaaagtttgaaaccccgcactgaaaagcaccaactggttggaaataatatactgagaggagtgaaattcatcaattaatctgagtggctaatatatttaatatcctttgtatacaaagtaaaactccaccattcgtaaaaggaaatccttagacccaactttcagttaacaaaaacagaaatgactttgacccagggtgcttcctgaagaatgagaactatccagggctttacaactgcagaattgtaattatgctctgtgcaattgttgagcaaaggttttgccttgctggataaaaagtcttgtttgtttcgagacatgaaatccccatgtcttaaaagaactaaggcttatagaaaagcagatgggttttctctcaggaaggactgccccattgacctttgccttctcttccaagtcagacagacttctcgcttgccatgggcatttttttactacatagtcagactactggggctacttatagagaccttgtaaaagtactcgtgattttcacgttcttggaggaccaaacaaaaatctgtttctcctccaaaaatggacttacctcctttgcacacaaaagctaaactcctcagcatgaaattgtttgagttattactttaccaagttgtgagcttcttgaatcctccagagtcgcagattccatccctgagttggttgtggtttcactgtttctattggctattctccctgaatttttcattttgttctttgcagggctcgaattatttgtggaaaacaataatatatatgtgtgtgtattttttatctttatagatgctatatttacaataatgtatgtattataagacaaattaagaataatgttttgatcttaaaaggaagaaaagtactgaatttggttgtttagaaagaaaatctatgctcacgtagaaagacatagagccccactttttccgttttgtaattatttggcgaaaagaaatttgcttatagactatgtttaatgggattaaccatgtcctcatttttcttttcatcctcatacacttttagcctgcatttagtcttggttaccaatatcattttttaagagaaatgtaagtacagtgctatatcttacctacataaactattaatattttgaagacaaatgtgaaacacaccacaaaaatggtgagataagaaacaaaaatgcagtttaggaagcctcctccttgcttaaatgtttagaatatttcttctccaaagactgcatttgcctcagtgatgtaaattttccatcatggttggcataatatctgtaaacatctcactaaatgcaaaatggagtttacatttatgtgcatactagcagaaaagaagtaaactattctcatttgcatgtagctatgctgttcaaatgtcgccaaccaaaatttaggaaagaatttgttttcacccagcatgtacatctcacttttctcttggcaaggaagctggtgttaacgttgggtttaggtttaacatttacaccagcgaaaatgtttatgaatattatggaaaacttattttaaaccttgatttcttttgagcacatttacatgctgcgtgctgattaataaattaggcaccaatcatgtgtaaatcaatgtaaatcactagtttatgtacataatataaactatgtaaacttcatttttcatgcagtgcccaactactgctaaggtttactatgattcttaaggaaaaaaaaatcaaataaaaataaataaaaactgaaacgtttcacagttcagaatcggaagaattacgactaaagctccaaatatgaggttgccttagccaaaggaagcagacccacaggaacagttcaaggtttatatcctgctcaagtcacctctttggtctttcaggatctaagtggagattgtcccaactgttgctgtagttgtctcacccgaccccaaagcaagggaaatagagggaaaggttttaagggctatatgtctgctgtatccactcccagctatcttctttttactcctttctcaccatctaagatgtcttatttaaatagctccaaggaagtgacctaaaccttgatgagcaaaatattactcagtttttattttccattcaacaaaagcagtgggaaagcttgccatctggattctaagaaattgtgcaatataaaaaatgttatatcctcgagaaatatcttgctgagtcaccctaggaaataactaccttttatttatctggtagcctaatgtttccacacatttatcctgaatattgcaagtgagggactgaatcatttttaattgggagttatctttctcaggcatgttctcttggagtctttttgaagtgcctgacacgtgtaacaggatgacatatatatcattcctacaatatgaacaactgttacataaaaaattatcaaggagatgatttcaggaaacaagtgaactttctgcaaagacttataaaaattttaggtcaaattaacttcaggctttaaatgcactaatctacctaagagaaaaaaaaagaaaaaaaacaggaaggagttttaagggctcatgtgcctgttgtatcaacccccaagtgtcttcttggtactgcttcctcatcatctaagataaactgacaactttaaagtgaggtagaaggtgtattgaattgggagtcaggagaattgggttctaaccccaagttcagccacaaataaagctgtgagacattggcaagtcatttaactttcctgagtcttggttttctcatcctgaaagtgagggattcggctgacgtctctaaaatctctttcaactctaacctttattctgaataagaatttaatattcacttagtgctgtgcccagcactgtttgtaaacagcagctgtttgttatctctagtttggtctctgtattctcatcacttctcagaactatcattctaccgtcttcatttctaaacccaaaactgctagaatacagggactctggactgggtctgtaaattttttctgatcaaaactttatagcagtgtagagaagggacacattcaaattacactaaggacattgacatagctggggttgtttccttgtttatattataaaacctaaatgtggaactatattctaataatctttcataggaaggaaaatagccagactgggtattatgcatgtaacaaatgaggacattgtgcataagaaaggaaacattagttttctgtcatcctgggccaagtacctcattacagtaaatgtgtgtctttggaaactctttgcttgtgctgatggcggtaagcatggggtcccaggcaggttcaaaggctgaactgtaagaaatgggcaagacaatacattttgttttggaaggaatttctcatgggataagtttcccaaagcttgaattataggctatgaaataaagcaaatagatggagagaaaacaagtattgttttcaaaaagtacaagtcaattctatttaaagaagacaagctgaaaataaaacaaaaataaacacaatttaggaggttacagagttgaagacagtatgaattgttgtgaaggccaaaatcaaatgtgaaagttaggttctctgagaaaagggtaagcagaaaggatgatttctcaagcaattaataaggaattattttcttgtgccatgttctagatgcattgagcacagatcctcttgtcctaagctgtcctagaggctcaggttagcatctatccaaagttgtcctttgattttattgtctgaaagaacagaaggcatcagagtttccagtcactgaagagtagggtttgttcatcacttcccagcaatcacatcactttgtgtaggtaaggatatatgatgtgcttagattacttatgaagctctctctaagtgggagaatgacctgtccatgggacaactccccgttttcatggtcatttcagaagtacctctttttgggcagtgctcctggatctacttctacagccacattctactctgcacaatcctccctatgtaaagccaggcacagtacaaatatgcttcttgcaagtgaagaaaacccatggaagtcctagcttcatggcacgctgcagcaatcccaagctaccaggagcctcttttgaacccacttccctaagtctttgctcttcaccagagaatggaaattgttcatcctggtgaactgtggccaagttctgctccctaagtatttacttggagtagggaggttaaagggaagaaattcagggggagagaagcaaaagagaacacttccaactccctcccccatctcccaatgctccccaccttccttatcactgctctactgaagggtgtataaatcctgctcttggttagaattctccttattaacagtgttatatacatataaatatatatataaatatattccttttttcagccctgtagacatgaactgatcttcccttgaagatacaaacacatggccattttttgtttgggattttttgtttttcaaggtttttcatttttgtttattaggtggatttttttccctgggtactagctctgtgaaggagataaaaagcgcaatgtgtgttaaaaaaaaaaaattaaaattaaaatgaaaaaaagctttttttcttttctttttaaatgtatttaaattctgtttctctcttctgttactttacacgtatgaatgctctgctcttctgtgatcttaaaacaaaatgaaataaacgtgaaaaggagatgtgtcttcattgacctgtcaaaaaaaaaaaaaaaaaaaaaaaaaaaaaaa

SEQ ID NO: 290 - DNA, 1047 bp, Artificial Sequence
  FABP7
tttctcaggcataagggctgtagtgtgaggattgggaggaactcgacctactccgctaacccagtggcctgagccaatcacaaagaggattggagcctcactcgagcgctccttcccttctcctctctctgtgacagcctcttggaaagagggacactggaggggtgtgtttgcaatttaaatcactggatttttgcccaccctctttccaaataagaaggcaggagctgcttgctgaggtgtaaagggtcttctgagctgcagtggcaattagaccagaagatccccgctcctgtctctaaagaggggaaagggcaaggatggtggaggctttctgtgctacctggaagctgaccaacagtcagaactttgatgagtacatgaaggctctaggcgtgggctttgccactaggcaggtgggaaatgtgaccaaaccaacggtaattatcagtcaagaaggagacaaagtggtcatcaggactctcagcacattcaagaacacggagattagtttccagctgggagaagagtttgatgaaaccactgcagatgatagaaactgtaagtctgttgttagcctggatggagacaaacttgttcacatacagaaatgggatggcaaagaaacaaattttgtaagagaaattaaggatggcaaaatggttatgacccttacttttggtgatgtggttgctgttcgccactatgagaaggcataaaaatgttcctggtcggggcttggaagagctcttcagtttttctgtttcctcaagtctcagtgctatcctattacaacatggctgatcattaattagaaggttatccttggtgtggaggtggaaaatggtgatttaaaaacttgttactccaagcaacttgcccaattttaatctgaaaatttatcatgttttataatttgaattaaagttttgtcccccccccccttttttttataaacaagtgaatacattttataatttcttttggaatgtaaatcaaatttgaataaaaatcttacacgtgaaatttaaaaaaaaaaaaaaaaaa

SEQ ID NO: 291 - DNA, 755 bp, Artificial Sequence
  CSHL1
gaaacaggtgggggcaacagcgagagagaaggggccagggtataaaaagggcccacaagagaccagctccagcatcccaaggcccgactccccgcaccactcagggtcctgtggacagctcacctagcggcaatggctgcaggaagaagcctatatcacaaaggaacagaagtattcattcctgcatgactcccagacctccttctgcttctcagactctattccgacatcctccaacatggaggaaacgcagcagaaatccaacttagagctgctccacatctccctgctgctcatcgagtcgcggctggagcccgtgcggttcctcaggagtaccttcaccaacaacctggtgtatgacacctcggacagcgatgactatcacctcctaaaggacctagaggaaggcatccaaatgctgatggggaggctggaagacggcagccacctgactgggcagaccctcaagcagacctacagcaagtttgacacaaactcgcacaaccatgacgcactgctcaagaactacgggctgctccactgcttcaggaaggacatggacaaggtcgagacattcctgcgcatggtgcagtgccgctctgtggagggcagctgtggcttctaggggcccgcgtggcatcctgtgacccctccccagtgcctctcctggccctgaaggtgccactccagtgcccaccagccttgtcttaataaaattaagttgtattgtttcatctgaaaaaaaaaaaaaaaaa

SEQ ID NO: 292 - DNA, 2102 bp, Artificial Sequence
  SNAP25
attaaaagctgctgacgtcaaaacggacggccatctttgatgagggcagagctcacgttgcattgaagacgaaacctcggggaggtcaggcgctgtctttccttccctccctgctcggcggctccaccacagttgcaacctgcagaggcccggagaacacaaccctcccgagaagcccaggtccagagccaaacccgtcactgaccccccagcccaggcgcccagccactccccaccgctaccatggccgaagacgcagacatgcgcaatgagctggaggagatgcagcgaagggctgaccagttggctgatgagtcgctggaaagcacccgtcgtatgctgcaactggttgaagagagtaaagatgctggtatcaggactttggttatgttggatgaacaaggagaacaactcgatcgtgtcgaagaaggcatgaaccatatcaaccaagacatgaaggaggctgagaaaaatttaaaagatttagggaaatgctgtggccttttcatatgtccttgtaacaagcttaaatcaagtgatgcttacaaaaaagcctggggcaataatcaggacggagtggtggccagccagcctgctcgtgtagtggacgaacgggagcagatggccatcagtggcggcttcatccgcagggtaacaaatgatgcccgagaaaatgaaatggatgaaaacctagagcaggtgagcggcatcatcgggaacctccgtcacatggccctggatatgggcaatgagatcgatacacagaatcgccagatcgacaggatcatggagaaggctgattccaacaaaaccagaattgatgaggccaaccaacgtgcaacaaagatgctgggaagtggttaagtgtgcccacccgtgttctcctccaaatgctgtcgggcaagatagctccttcatgcttttctcatggtattatctagtaggtctgcacacataacacacatcagtccacccccattgtgaatgttgtcctgtgtcatctgtcagcttcccaacaatactttgtgtcttttgttctctcttggtctctttctttccaaaggttgtacatagtggtcatttggtggctctaactccttgaggtcttgagtttcatttttcattttctctcctcggtggcatttgctgaataacaacaatttaggaatgctcaatgtgctgttgattctttcaatccacagtattgttcttgtaaaactgtgacattccacagagttactgccacggtcctttgagtgtcaggctctgaatctctcaaaatgtgccgtctttggttcctcatggctgttatctgtctttatgatttcatgattagacaatgtggaattacataacaggcattgcactaaaagtgatgtgatttatgcatttatgcatgagaactaaatagatttttagattcctacttaaacaaaaactttccatgacagtagcatactgatgagacaacacacacacacacaaaacaacagcaacaacaacagaacaacaacaaagcatgctcagtattgagacactgtcaagattaagttataccagcaaaagtgcagtagtgtcacttttttcctgtcaatatatagagacttctaaatcataatcatccttttttaaaaaaaagaattttaaaaaagatggatttgacacactcaccatttaatcatttccagcaaaatatatgtttggctgaaattatgtcaaatggatgtaatatagggtttgtttgctgcttttgatggctatgttttggagagagcaatcttgctgtgaaacagtgtggatgtaaattttataaggctgactcttactaaccaccatttcccctgtggtttgttatcagtacaattctttgttgcttaatctagagctatgcacaccaaattgctgagatgtttagtagctgataaagaaaccttttaaaaaaataatataaatgaatgaaatataaactgtgagataaatatcattatagcatgtaatattaaattcctcctgtctcctctgtcagtttgtgaagtgattgacattttgtagctagtttaaaattattaaaaattatagactccagaaaaaaaaaaaaaaaa

SEQ ID NO: 293 - DNA, 3021 bp, Artificial Sequence
  PLN
actttttctcctccacctactgcaactgttcccataaactgggtgacagagtcagaaaactccccagctaaacacccgtaagacttcatacaacacaatactctatactgtgatgatcacagctgccaaggctacctaaaagaagacagttatctcatatttggctgccagctttttatctttctctcgaccacttaaaacttcagacttcctgtcctgctggtatcatggagaaagtccaatacctcactcgctcagctataagaagagcctcaaccattgaaatgcctcaacaagcacgtcaaaagctacagaatctatttatcaatttctgtctcatcttaatatgtctcttgctgatctgtatcatcgtgatgcttctctgaagttctgctacaacctctagatctgcagcttgccacatcagcttaaaatctgtcatcccatgcagacaggaaaacaatattgtataacagaccacttcctgagtagaagagtttctttgtgaaaaggtcaagattaagactaaaacttattgttaccatatgtattcatctgttggatcttgtaaacatgaaaagggctttattttcaaaaattaacttcaaaataagtgtataaaatgcaactgttgatttcctcaacatggctcacaaatttctatcccaaatcttttctgaagatgaagagtttagttttaaaactgcactgccaacaagttcacttcatatataaagcattatttttactcttttgaggtgaatataatttatattacaatgtaaaagcttctttaatactaagtatttttcaggtcttcaccaagtatcaaagtaataacacaaatgaagtgtcattattcaaaatagtccactgactcctcacatctgttatcttattataaagaactatttgtagtaactatcagaatctacattctaaaacagaaattgtattttttctatgccacattaacatcttttaaagttgatgagaatcaagtatggaaaagtaaggccatactcttacataataaaattccttttaagtaattttttcaaagaatcacagaattctagtacatgtaggtaaatcataaatctgttctaagacatatgatcaacagatgagaactggtggttaatatgtgacagtgagattagtcatatcactaatatactaacaacagaatctaatcttcatttaaggcactgtagtgaattatctgagctagagttacctagcttaccatactatatctttggaatcatgaaaccttaagacttcagaatgattttgcaggttgtcttccattccagcctaacatccaatgcaggcaaggaaaataaaagatttccagtgacagaaaaatatattatctcaagtattttttaaaaatatatgaattctctctccaaatattaactaattattagattatattttgaaatgaacttgttggcccatctattacatctacagctgacccttgaacatgggggttaggggagctgacaattcgtgggtccgcaaaatcttaactacctaatagcctactattgaccataaaccttactgataacataaacagtaaattaacacatattttgcgtgttatatgtattatacactatattcctacaataaagtaagctagagaaaatgttatttagaaaatcataagaaagagaaaatatatttactattcattaaatggaagtgggtcaacataaaagtcttcattctcattgtcttcacattgagtaggcagaggaggagaaagatggggaggaagagaaggcgttggtcttgcagtcttgtcttaggggtgtggggagtgggggaaagaatattcatgtataagtggacccttgcaattcaagcccttgttgttcaagggtcaactgtaataggatatagctatttttcttcctctatcaaccaaatggtaagcatctattttgcagtccactctactgagctaaattatagatccagctatgctatttataattattttcttgatgaataaattttcaatttctcctctgaccatttcagaacatcttccaataactcataaaacaactgaagtaaaattgagtgctggaaaatatattcaccaaactttggtaatttaagttgactaaagtttaaaattaagtctaaaatagtttacacctatactgcataatccaacaattttaatttcagttgaagacatgttactaatataactattattaaaagagtagaggatgtgtaattaaccatatcttctaaaacatggttactaaaagaatatgtaacatcaatattgaccttggtttcttacacaagtgttgctaactcaatagtgaaggagacactattaaattttctgaacccatgagagatactagagatggggagtggaaagtgtttggttcagggatatctgaagaacagaagggcagagatttcttaagtgacgcctcatctacaagctggaaattcctaaaaacaagtagaaagcttataaacaacaggtgatacactcacctcactggttttagtaaattaccaatacagaaagtatccctagtcttaaaaacaagtggaaaatttgaactgattagtcatattcctttgattacactgtttgttacaatatttttctcagtaaacagaaataactaatttttttgttcttcattctttgatagaaattaaaatcttattctgtgaggattacagaatactataactcaaattataaagtagaataaactctttaaataattattcttcatcataaagtgtaaagaataagatataagaaaacaatttatttttaaaatttaatatactaaatgctcaaatatgttctactatagaataagttcttatcttaatttacagggcactaaaaacaattttaaaatgcttaatgttgccttttatattttaattggttaagaatatatatttgtttaatgcaaatcagaatcactatattaaaatgaatgttcttgaaaactc

SEQ ID NO: 294 - DNA, 6105 bp, Artificial Sequence
  INHBA
agtacagtataaaacttcacagtgccaataccatgaagaggagctcagacagctcttaccacatgatacaagagccggctggtggaagagtggggaccagaaagagaatttgctgaagaggagaaggaaaaaaaaaacaccaaaaaaaaaaataaaaaaatccacacacacaaaaaaacctgcgcgtgaggggggaggaaaagcagggccttttaaaaaggcaatcacaacaacttttgctgccaggatgcccttgctttggctgagaggatttctgttggcaagttgctggattatagtgaggagttcccccaccccaggatccgaggggcacagcgcggcccccgactgtccgtcctgtgcgctggccgccctcccaaaggatgtacccaactctcagccagagatggtggaggccgtcaagaagcacattttaaacatgctgcacttgaagaagagacccgatgtcacccagccggtacccaaggcggcgcttctgaacgcgatcagaaagcttcatgtgggcaaagtcggggagaacgggtatgtggagatagaggatgacattggaaggagggcagaaatgaatgaacttatggagcagacctcggagatcatcacgtttgccgagtcaggaacagccaggaagacgctgcacttcgagatttccaaggaaggcagtgacctgtcagtggtggagcgtgcagaagtctggctcttcctaaaagtccccaaggccaacaggaccaggaccaaagtcaccatccgcctcttccagcagcagaagcacccgcagggcagcttggacacaggggaagaggccgaggaagtgggcttaaagggggagaggagtgaactgttgctctctgaaaaagtagtagacgctcggaagagcacctggcatgtcttccctgtctccagcagcatccagcggttgctggaccagggcaagagctccctggacgttcggattgcctgtgagcagtgccaggagagtggcgccagcttggttctcctgggcaagaagaagaagaaagaagaggagggggaagggaaaaagaagggcggaggtgaaggtggggcaggagcagatgaggaaaaggagcagtcgcacagacctttcctcatgctgcaggcccggcagtctgaagaccaccctcatcgccggcgtcggcggggcttggagtgtgatggcaaggtcaacatctgctgtaagaaacagttctttgtcagtttcaaggacatcggctggaatgactggatcattgctccctctggctatcatgccaactactgcgagggtgagtgcccgagccatatagcaggcacgtccgggtcctcactgtccttccactcaacagtcatcaaccactaccgcatgcggggccatagcccctttgccaacctcaaatcgtgctgtgtgcccaccaagctgagacccatgtccatgttgtactatgatgatggtcaaaacatcatcaaaaaggacattcagaacatgatcgtggaggagtgtgggtgctcatagagttgcccagcccagggggaaagggagcaagagttgtccagagaagacagtggcaaaatgaagaaatttttaaggtttctgagttaaccagaaaaatagaaattaaaaacaaaacaaaaaaaaaaacaaaaaaaaacaaaagtaaattaaaaacaaaacctgatgaaacagatgaaggaagatgtggaaaaaatccttagccagggctcagagatgaagcagtgaaagagacaggaattgggagggaaagggagaatggtgtaccctttatttcttctgaaatcacactgatgacatcagttgtttaaacggggtattgtcctttccccccttgaggttcccttgtgagccttgaatcaaccaatctagtctgcagtagtgtggactagaacaacccaaatagcatctagaaagccatgagtttgaaagggcccatcacaggcactttcctacccaattacccaggtcataaggtatgtctgtgtgacacttatctctgtgtatatcagcatacacacacacacacacacacacacacacacacacaggcatttccacacattacatatatacacatactggtaaaagaacaatcgtgtgcaggtggtcacacttcctttttctgtaccacttttgcaacaaaacaaaacaaacaacattaaaaaattgagaacaagtatggaaagaatgaaagatcaaggaaaaaagaataccaagttacatttcgttaaggtgcttatgatcttagaactatgcaacctaataggtttgaaactgtttacctgagagagaacaaaaagagagacttttttgtattggaagtaatctgattaatttttattttcttcaaggagagatacttgaaaggaatatgtttgtccatctgttggatccaaacatttctatattttgtaaatgttgttgttgttttttttttaatcgtttactatttgcactacaatggtgtttgacctgtctaatccttatttaacaagtattttctttggttgggggtgggggtggggtttaagagctgcacttaatgtgagctataaaagaactgctacagcacacaaaatagctatttttattattataattataattattattattattttgtaccttaaaaaatagacacatacaccaaagacatttgtgtgagcctttaaacagtctgtctgtggttggtatcattcaccatcaatgagtcaggggttgggattcaaggttgagtagtgtggattgtgttcaggcttaaaagacctgagaagtttggtttttgactccttttacatccatgaaacaggacatttcatactggatgtacagtagttgtacactgttggatatcaagttcaatcaaattcatggaactacatgcttgtatgtgtatatatacattgcttgtgcatatgcatatctgtatgtatatatacatgtattgtaccatgtccatacacattttaagcacttcaggctgtcattttttaatgttcttaaagcaatgaatgtttgtgtgcaaaacacagtatttttaagaaggataggctatagtttttgcttttactctgaactaggtgggcgcatttcaaaaattcggatgggaaaaagcctggaaattccagtgaatattcagcaaggccctctttcattgtacagggatcaaatttcctcctcttttttgtgccccctcccacttctacaagttatcccctgtggggaaaacaggatgataatcaaaactctgggctgatgtttttccaacttagtgtctattggaatcaatcttaaatcagaagctttttcagaaaaataatatttaggccagaattagagttgagtgtattttttaaaaatgattaaggcttggttgtgagaaatattacctgtaccagctgggaaaaataatgtcatcactaactaaaagataattaatttgagagaaagtgttaagagagggagagtaaggaagagaacagttaagaggaggcagaggtgagggcagtagtaaaaatctctaaaattttaatttacagccaaaattcttcatgtgtaaatttgtattgattcagatgcagaaatgaaaaaaaaacacctttgttttataaatatcaaagtacatgcttaaagccaagtttttatctagtttattctagtacttagcttgcctggaatagctaataaattattcatgtatgtgcttttgaaaatccagagccctatttttacacacttgtgtgaagttggcaaacattttgaaaaatggaaaaaagtttctaataattgggaacaattacattaattaatattttgtaaaatattgaagcttttagccctatgtcaatttgtagattaaaataaattaattataggaaaggaagataacagtgagaaaccaaacattacaaaaggtggtttagctctccttgaaaaatatactaagttggtatactataacacttggctatatgtaggcaatgtcactactgggcaaatacacttactgtgttctagaggcagccctttcttatgcagaaaatacaatacgcactgcatgagaagcttgagagtggattctaatccaggtctgtcgaccttggatatcatgcatgtgggaaggtgggtgtggtgagaaaagttttaaggcaagagtagatggccatgttcaactttacaaaatttcttggaaaactggcagtattttgaactgcatcttctttggtaccggaacctgcagaaacagtgtgagaaattaagtcctggttcactgcgcagtagcaaagatggtcaaggccatggaaaaagcagaaatttaccaagaaagctgatacccatgtatagttcccactcatctcaaatacatctgctatctttttaagctaagtcctagacatatcggggataacatgggggttgattagtgaccacagttatcagaagcagagaaatgtaattccatattttatttgaaacttattccatattttaattggatattgagtgattgggttatcaaacacccacaaactttaattttgttaaatttatatggctttgaaatagaagtataagttgctaccattttttgataacattgaaagatagtattttaccatctttaatcatcttggaaaatacaagtcctgtgaacaaccactctttcacctagcagcatgaggccaaaagtaaaggctttaaattataacatatgggattcttagtagtatgtttttttcttgaaactcagtggctctatctaaccttactatctcctcactctttctctaagactaaactctaggctcttaaaaatctgcccacaccaatcttagaagctctgaaaagaatttgtctttaaatatcttttaatagtaacatgtattttatggaccaaattgacattttcgactattttttccaaaaaagtcaggtgaatttcagcacactgagttgggaatttcttatcccagaagaccaaccaatttcatatttatttaagattgattccatactccgttttcaaggagaatccctgcagtctccttaaaggtagaacaaatactttctatttttttttcaccattgtgggattggactttaagaggtgactctaaaaaaacagagaacaaatatgtctcagttgtattaagcacggacccatattatcatattcacttaaaaaaatgatttcctgtgcaccttttggcaacttctcttttcaatgtagggaaaaacttagtcaccctgaaaacccacaaaataaataaaacttgtagatgtgggcagaaggtttgggggtggacattgtatgtgtttaaattaaaccctgtatcactgagaagctgttgtatgggtcagagaaaatgaatgcttagaagctgttcacatcttcaagagcagaagcaaaccacatgtctcagctatattattatttattttttatgcataaagtgaatcatttcttctgtattaatttccaaagggttttaccctctatttaaatgctttgaaaaacagtgcattgacaatgggttgatatttttctttaaaagaaaaatataattatgaaagccaagataatctgaagcctgttttattttaaaactttttatgttctgtggttgatgttgtttgtttgtttgtttctattttgttggttttttactttgttttttgttttgttttgttttgttttgcatactacatgcagttctttaaccaatgtctgtttggctaatgtaattaaagttgttaatttatatgagtgcatttcaactatgtcaatggtttcttaatatttattgtgtagaagtactggtaatttttttatttacaatatgtttaaagagataacagtttgatatgttttcatgtgtttatagcagaagttatttatttctatggcattccagcggatattttggtgtttgcgaggcatgcagtcaatattttgtacagttagtggacagtattcagcaacgcctgatagcttctttggccttatgttaaataaaaagacctgtttgggatgtaaaaaaaaaaaaaaaaaaaaaaaaaaaaaaaaaaaaaaaaaa

SEQ ID NO: 295 - DNA, 1760 bp, Artificial Sequence
  PTN
agtggctttgcactcatctgaagaatagatcatgggtggagtttggaaaagaaatgttgtgtttcgtctctgctaaaaacaaaacaaggtaccatctcatggcctcttggttcaaatccgttttcttgctccgcagggagagactgcccctggagtattctgcttttaataagcttcccaatcagctctcgagtgcaaagcgctctccctccctcgcccagccttcgtcctcctggcccgctcctctcatccctcccattctccatttcccttccgttccctccctgtcagggcgtaattgagtcaaaggcaggatcaggttccccgccttccagtccaaaaatcccgccaagagagccccagagcagaggaaaatccaaagtggagagaggggaagaaagagaccagtgagtcatccgtccagaaggcggggagagcagcagcggcccaagcaggagctgcagcgagccgggtacctggactcagcggtagcaacctcgccccttgcaacaaaggcagactgagcgccagagaggacgtttccaactcaaaaatgcaggctcaacagtaccagcagcagcgtcgaaaatttgcagctgccttcttggcattcattttcatactggcagctgtggatactgctgaagcagggaagaaagagaaaccagaaaaaaaagtgaagaagtctgactgtggagaatggcagtggagtgtgtgtgtgcccaccagtggagactgtgggctgggcacacgggagggcactcggactggagctgagtgcaagcaaaccatgaagacccagagatgtaagatcccctgcaactggaagaagcaatttggcgcggagtgcaaataccagttccaggcctggggagaatgtgacctgaacacagccctgaagaccagaactggaagtctgaagcgagccctgcacaatgccgaatgccagaagactgtcaccatctccaagccctgtggcaaactgaccaagcccaaacctcaagcagaatctaagaagaagaaaaaggaaggcaagaaacaggagaagatgctggattaaaagatgtcacctgtggaacataaaaaggacatcagcaaacaggatcagttaactattgcatttatatgtaccgtaggctttgtattcaaaaattatctatagctaagtacacaataagcaaaaacaaaaagaaaagaaaatttttgtagtagcgttttttaaatgtatactatagtaccagtaggggcttataataaaggactgtaatcttatttaggaagttgacttatagtacatgataaatgatagacaattgaggtaagttttttgaaattatgtgacattttacattaaattttttttacattttttgggcagcaatttaaatgttatgactatgtaaactacttctcttgttaggtaatttttttcacctagatttttttcccaattgagaaaaatatatactaaacaaaatagcaataaaacataatcactctatttgaagaaaatatcttgttttctgccaatagattttttaaaatgtagtcagcaaaatgggggtggggaagcagagcatgtcctagttcaatgttgactttttttttttttaaagaaaagcattaagacataaaattctttcactttggcagaagcatttgttttcttgatgaaattatttttccatctgaggaaaaaaatactaggaaaataaatcaaggtgatgctgaaaaaaaaaaaaaaaaaaaaaaaaaaaaaa

SEQ ID NO: 296 - DNA, 1776 bp, Artificial Sequence
  MNDA
aaaattgtttcatgattacataacttctttctagttaggaattaggacagtgtaagaaggccatctacaatcaagattgagagtggctctaacaagtgccatttttccttgttagctttcatttctcagccctttacaagattaaaatagtctgcagtttaatctctccaaagctttacggacagtgattctgtcctaaacaagacagtgactccaggatttctgaagactattgtggaagaagcatccattaaggccaagctataacatcagaaatggtgaatgaatacaagaaaattcttttgctgaaaggatttgagctcatggatgattatcattttacatcaattaagtccttactggcctatgatttaggactaactacaaaaatgcaagaggaatacaacagaattaagattacagatttgatggaaaaaaagttccaaggcgttgcctgtctagacaaactaatagaacttgccaaagatatgccatcacttaaaaaccttgttaacaatcttcgaaaagagaagtcaaaagttgctaagaaaattaaaacacaagaaaaagctccagtgaaaaaaataaaccaggaagaagtgggtcttgcggcacctgcacccaccgcaagaaacaaactgacatcggaagcaagagggaggattcctgtagctcagaaaagaaaaactccaaacaaagaaaagactgaagccaaaaggaataaggtgtcccaagagcagagtaagcccccaggtccctcaggagccagcacatctgcagctgtggatcatcccccactaccccagacctcatcatcaactccatccaacacttcgtttactccgaatcaggaaacccaggcccaacggcaggtggatgcaagaagaaatgttccccaaaacgacccagtgacagtggtggtactgaaagcaacagcgccatttaaatacgagtccccagaaaatgggaaaagcacaatgtttcatgctacagtggccagtaagactcaatatttccatgtgaaagtcttcgacatcaacttgaaagagaaatttgtaaggaagaaggtcattaccatatctgattactctgaatgtaaaggagtaatggaaataaaggaagcatcatctgtgtctgactttaatcaaaattttgaggtcccaaacagaattatcgaaatagcaaataaaactcccaagatcagtcaactttacaagcaagcatctggaacaatggtgtatgggttgtttatgttacaaaagaaaagcgtacacaagaagaacacaatttatgaaatacaggataatacaggatccatggatgtagtggggagtggaaaatggcacaatatcaagtgtgagaaaggagataaacttcgactcttctgccttcaactgagaacagttgaccgcaagctgaaactggtgtgtggaagtcacagcttcatcaaggtcatcaaggccaagaaaaacaaggaaggaccaatgaatgttaattgaaatatgaaagctgaaatgcaacaaacaacttccgcttaaaacaattaagttgttaataactgtgattttgtaaatttcagtaattcatttaaatgatgtttcagtagatatattctagcatattaagagcttttataactgagttatagattagtttgctttctggaataaaattttcttcttatactcttccttttttttagatattacattttgcttttatgacattcacgaggcaaaaaataaaatatctttttttgaaggacaaaaaaaaaaa

SEQ ID NO: 297 - DNA, 3618 bp, Artificial Sequence
  PMP2
acactgcctttccccattgggtctctgtaagagtcacacgctttgggcatccttgaaaagaatcttctgaggcctcagcattttatctgagtcttctgaatcccacttagaactgtgttgagctctcacccatcacgatgagcaacaaattcctgggcacctggaaacttgtctctagtgagaactttgacgattacatgaaagctctgggtgtggggttagccaccagaaaactgggaaatttggccaaacccactgtgatcatcagcaagaaaggagatattataactatacgaactgaaagtacctttaaaaatacagaaatctccttcaagctaggccaggaatttgaagaaaccacagctgacaatagaaagaccaagagcatcgtaaccctgcagagaggatcactgaatcaagtgcagagatgggatggcaaagagacaaccataaagagaaagctagtgaatgggaaaatggtagcggaatgtaaaatgaagggcgtggtgtgcaccagaatctatgagaaggtctgaaaaatcatttcttcattgaagtggctttttatcatttaatgatggaaatcaattgcttccattgacaaaactgaatacactgcaaatatttgtttttgcttttgtcttaatatatcagatatgcaaaggcctaaactgagaattaatctaaaagtcagtgttatttaaacattttcaatgtgcatgcatgtcattattacatcaaagcatatatattggccagacacaaacagttgatgatgtcattcaattaactacaaaattctaatctatgttgaactttgtatacttgaaatgataataaaaaggatataatttcttagtaaaatgaaatcaaagtattgatcagggtagcaaactcaaatgctgacaggggccagaggagatatggggaaggagcatcagaaatgaggcaagctaggagaatgggctattataatgtaaagaattgtagtctcagttaaaaggggtagcctctactccagccaacattttaaaattaatggataatttatagacagttaaatttatagacagttaagtaaaaatggataatttatagacagataatttatagacaggtaaatgtgagttaaatataactcacatcccactcaagacacaaaacattttcttaatcctagtacatttttttctgtcccttcccaatcagtgtccttttctgttccacccctaccaaaagcaagtagtggtttggtttctatcatatagattaattttacctgctcatatgaagggaattgtacatcatgcattcttttctgtttgccttttttaaattcagcatcatgtttttgtgatacatccacattgttgcatgcagctgtagtttgtttctttttattaccaagtactatttcattgtatgaatatatcacagtttatccattctactattaagacaattgagctatttctaattttcggctgctatgaataaagctgctacaaatatttttgtacaagactttttgtaaacataggagtccctttattttaaataaataactagtcatatcattaggtccagtaattgttgacaggcaggaacgggggaccattgcattgtgcccaagtaataataaaactatttcagatgtattatatgattgagcaaatgagaaaacatgttgatgttgatgggagtcaggatgttcactatggaaaaacaaatatacaaatatgaaatgagggaaggcaagaaagaaccatgtggaaatggaatagaattggtataaattcataatttctaaaccatgtatatgtacgtttatatgtattataattgcatacacatgcctccatgcatatatgtgtgtgataatacacatgcatttatgtgcgtgtgtgtatacacatgcatatatttactaatcctatctgccaaaatggcttagacacaaaaacacctcagcagaaatgaatatacctagcactcagatcttcgtgtctaatatagtttgccactaaaaggaaccaaggctacttggaaaaatggatgattccaaagcaagggcaaggtaggaacaagatgagcttgaaatatcttgttatgccagaaagtaatgttaaaaaaaaaaatagaggtatattgccaaaacatagagccagcttgaaggggctcccactggccaaacttgagccaatctgagagcaaaataattgagaaaaataaataacaagataattgagaaaaaaataaaataaattcccaattccattgggaaaaaatagaaatccatgaatccatactgatataatgatagataatcgatagataggtagatgactgacagatgatagatagatatatagatagatagatagatagatagatagatagatagatagatagagaaatgagaaggtttctcttttgcaatagaacgtcatggaccagtgttaaatgtgagtggaaggagttctggaattggaaaaccatcatttttcaaccatcacagtaaatatggctcaggcaagaattatcaatcaatgctaaagctagggggaaatttcgcttaggagcaggatattagggtattagtctgggcttaaagtatctcctcacagattgttgttagtttctggggaaagaatagtaaccatgcaatggaaaaaaatggacaacctcttgactaggttatcaaaattaacctcaccaataaagggtggatgttcaacatgtgccttcaaatgtgacccactgagaaggaaacaacatcactgtaacaacaacaaccagaaacgacagggggttttgactgaattcttcaaaaatgtcaatgtcatagaagacaaagaaaggttgtggaaatgtttcagattaaatgatagtaaaaacacctgacaactaaacatagtaagtaatactagactggattctgtaccagaggtaacataagtgctccaaaggacaatgttaggtcaactggcaaattggaatatagacagtcaatcagataagaagtatactttgattaagtaaaaaaaatccctattcttggaaaatacacaataaagtattttgaggtaaagggccataatgtatgcaatctactctcaaaaaattcagaaacatatatttgtgtgcatttgcatgtgcaacagtacacacaaacatacataaagagagcaattgataaggcaaataaggtaacatttaacaataatctgatacacataaatagagaaagagcaattgataaagtaaatgaggtaaaatttaacaataatctgagcaaaaggtatatgtgttttctttgagacagtctgattcttgcaacttattctgtaagttggaacttatttccaaacatgattgaaaaaaaaccccgcacttggcaacttcttctctttttcagcctagaaatgtctgtgttaagtggttttttatttattgttgttgtttgttgttattgttgttttgttgccaggctccaactcacaaaatacgagtttaaaaactgcgttgttatttttagagatttgtgataatacaacttgttataaaatttattcctcaataaatataatttctctactatgcaaaaaaaaaaaaaaa

SEQ ID NO: 298 - DNA, 1728 bp, Artificial Sequence
  AHSG
tgtttgcttttccagggctgatgtttgcagggtgtttttttttttcttttgaaccaaagcagaaatcatcctgtatccttatgcaattcttccggcaggctccaacagataaataaagcccaccaccctccatgggtctacctttcccagcagagcacctgggttggtcccgaagcctccaaccacctgcacgcctgccagggcctctctggggcagccatgaagtccctcgtcctgctcctttgtcttgctcagctctggggctgccactcagccccacatggcccagggctgatttatagacaaccgaactgcgatgatccagaaactgaggaagcagctctggtggctatagactacatcaatcaaaaccttccttggggatacaaacacaccttgaaccagattgatgaagtaaaggtgtggcctcagcagccctccggagagctgtttgagattgaaatagacaccctggaaaccacctgccatgtgctggaccccacccctgtggcaagatgcagcgtgaggcagctgaaggagcatgctgtcgaaggagactgtgatttccagctgttgaaactagatggcaagttttccgtggtatacgcaaaatgtgattccagtccagactcagccgaggacgtgcgcaaggtgtgccaagactgccccctgctggccccgctgaacgacaccagggtggtgcacgccgcgaaagctgccctggccgccttcaacgctcagaacaacggctccaattttcagctggaggaaatttcccgggctcagcttgtgcccctcccaccttctacctatgtggagtttacagtgtctggcactgactgtgttgctaaagaggccacagaggcagccaagtgtaacctgctggcagaaaagcaatatggcttttgtaaggcaacactcagtgagaagcttggtggggcagaggttgcagtgacctgcatggtgttccaaacacagcccgtgagctcacagccccaaccagaaggtgccaatgaagcagtccccacacccgtggtggacccagatgcacctccgtcccctccacttggcgcacctggactccctccagctggctcacccccagactcccatgtgttactggcagctcctccaggacaccagttgcaccgggcgcactacgacctgcgccacaccttcatgggtgtggtctcattggggtcaccctcaggagaagtgtcgcacccccggaaaacacgcacagtggtgcagcctagtgttggtgctgctgctgggccagtggttcctccatgtccggggaggatcagacacttcaaggtctaggctagacatggcagagatgaggaggtttggcacagaaaacatagccaccattttgtccaagcctgggcatgggtggggggccttgtctgctggccacgcaagtgtcacatgcgatctacattaatatcaagtcttgactccctacttcccgtcattcctcacaggacagaagcagagtgggtggtggttatgtttgacagaaggcattaggttgacaacttgtcatgattttgacggtaagccaccatgattgtgttctctgcctctggttgaccttacaaaaaccattggaactgtgactttgaaaggtgctcttgctaagcttatatgtgcctgttaatgaaagtgcctgaaagaccttccttaataaagaaggttctaagctgaaaaaaaaaaaaaaaaaaa

SEQ ID NO: 299 - DNA, 5276 bp, Artificial Sequence
  AQP4
ctttccacccctaacactccaaaaacccaatcagacaagtggccgtaatctgactcccagcacacagggagctgcggggcaggcaatgagagctgcactctggctggggaaggcatgagtgacagacccacagcaaggcggtggggtaagtgtggacctttgtgtaccagagagaacatcatggtggctttcaaaggggtctggactcaagctttctggaaagcagtcacagcggaatttctggccatgcttatttttgttctcctcagcctgggatccaccatcaactggggtggaacagaaaagcctttaccggtcgacatggttctcatctccctttgctttggactcagcattgcaaccatggtgcagtgctttggccatatcagcggtggccacatcaaccctgcagtgactgtggccatggtgtgcaccaggaagatcagcatcgccaagtctgtcttctacatcgcagcccagtgcctgggggccatcattggagcaggaatcctctatctggtcacacctcccagtgtggtgggaggcctgggagtcaccatggttcatggaaatcttaccgctggtcatggtctcctggttgagttgataatcacatttcaattggtgtttactatctttgccagctgtgattccaaacggactgatgtcactggctcaatagctttagcaattggattttctgttgcaattggacatttatttgcaatcaattatactggtgccagcatgaatcccgcccgatcctttggacctgcagttatcatgggaaattgggaaaaccattggatatattgggttgggcccatcataggagctgtcctcgctggtggcctttatgagtatgtcttctgtccagatgttgaattcaaacgtcgttttaaagaagccttcagcaaagctgcccagcaaacaaaaggaagctacatggaggtggaggacaacaggagtcaggtagagacggatgacctgattctaaaacctggagtggtgcatgtgattgacgttgaccggggagaggagaagaaggggaaagaccaatctggagaggtattgtcttcagtatgactagaagatcgcactgaaagcagacaagactccttagaactgtcctcagatttccttccacccattaaggaaacagatttgttataaattagaaatgtgcaggtttgttgtttcatgtcatattactcagtctaaacaataaatatttcataatttacaaaggaggaacggaagaaacctattgtgaattccaaatctaaaaaaagaaatatttttaaaatgttcttaagcaaatatatacctattttatctagttacctttcattaacaaccaattttaaccgtgtgtcaagatttggttaagtcttgcctgacagaactcaaagacacgtctatcagcttattccttctctactggaatattggtatagtcaattcttatttgaatatttattctattaaactgagtttaacaatggcaaaatacagtatgtcacagtcatgcacattcaagagagaaaatataacaagttcttttatgagcaatcccttatgcatagactaccttggcaaaagagcattagcaagtgtcactgctcatcagttacttccttccatttatatcacaaatacccaagtttcaattctaacttcatttcatggtatttcttcctcctcaatgcccaaggtaatgtgggactaaagcccagaaatttgaaaagaatattcagaaatccttcccaaatcataagggcacctattgagattcaagacaagcagactcgtaaaatcttgtagaggcagaggcaaagttatcatcatacaaaaatcacaaacaaaaaggagatctgtattcgggtatcaaacggttgatctgttttcagtgcacaccctcaaatgcaccacaccagttttacgatctaagcttttaacccctttaccactttgcttatttttaaaaaatttattggcaaaactggggattttgtttgtaactttggttatctatatttaaacattagctgagacatatttttgataacaagaacttagctagttgagtcctggctttttgttgattattaagctgtgttcactctagaaggtgtaaaggccctgtcccaatctctgctctctcacttctcgtgacatttgttgataatctttactgcaagtgtaatgatatttgagtgaattaaaatgcatgacagacaaggtacaacatggttgcagaataaaagggtgaggacatcagatcactctgtattcaaagcttactagacgaacaatctttcatttctggatatattgtagctaacccaacacatttttaaactatttttgttactgactcacttacttgtcaaaataattggtttttctgtcctgctttgccttttgtcactagaatgttctccagaaaccccagtttctgtcatcttaactgtctagtctagccgttaacttagacaaagaagtgcaaatgtcaatttcactaaacaaaagctattagaagtaaagcagaaacctatcactgcaaggagtgacttgtaaataactgatgatcaagggctgtcttctctcaagcatggttccaactctgtgtcactttttagcgttaatggcagttgtgtgtctgtggcagtgagataatggaccactattaaacctgattctcttcggtgctaggaaagagtgatgtgtgagattcccagagagtcgtcacaccagtgttatgcctgggagtgccactggcataccgcaggtgcctaaatcccaggcccctttctcagggggcgtggccacaccacacactgcgccagtgacacatagttacttcctggctgggacggcacctatagaaactagggtacaaatctcccaaagatggtttgcaccgtcatttcaaatgtttgcacaatataccacttagaggcttaaaatcagggtggttcagttcaaaaggtaatatcaaccgtcagcaaacatgtcagtttaaaaataagttcggttaacaaggaagtgttaagcagattttttgaatacacttacaatatactggcttataatcatttttattctgccatatggtttatttcatatacactcacttttacactcacttccaattatagcattcaataagttacggttaaagaaaagtgaatggtgtttttgtaatttgttttctagtagctagcagagagcctggcacatagtatgtattcaaaacaagtgtgttaattaataaaaatatataaatctcatttgagatttaagaatataaataattttcttttaatctttattttgctcaatatttaataggaagtatgatttcaaggactactaaaggaaggcaatatacatgtgaaaaccataaaatacattttttgcattctactatttttaggggcatgaaatgaatgaaagctttagcacttttttgcccctacatatgagacaacatattttgtatttcactcaaggctctgccagtaaaaagtaatgaaattgtacctttctaatgacatctatgcagcaggggtctatcgccttgtggatggcaccaaattatccaagtgtattaggagactggggcttttttctttaatcccttcttattaatgaagtgcatagtgctgctcccaggagaccactgctgacagatacacagagaagagatcagagaggaaaaactgggaagacataaatgaattatacccagccatgaaacaatgccaactgtctcttccctaaggaagagtacaagtaccctaaaattgaaaggtggtccctacactgaaaacgcacatagtttgtcaaaagtgtacaaaagggaaagagtcttattttaagctttcaggctttcttaaaaacttggggaccagaatttcaatgtatgtttccattgttgaagataacattttcttcaaagagccttaaccttttgtactggaaggaaatattttctggacttaagtagttgcctaaatttaagattcctacactttatttctgccattgatgcttttcctaaacccttatactatctttttattatctgagccttttcctaatgcagctcataggtgctagctagagctgctgctcagtattgaagactttacaaggagattagaaatctttggaaaacatatgtgatgaaattgagctatatgatttatcagagatctgattccaaagagcacagaatactgttctcagaccatgaaaccagacaacacatgtattggtttaaactcgataatgacaggaaaattccaaactagagcagtaaattcaaatggtaagatgaatcctagaaggcctctgattgcagcatgttgacaccaacctcacgttacgaacaattcacagagaatttgcctttgtggcaactgaagatggaagtctggggggcacagacaaccttatcaaacaatataaaagccaatataaattctcataagcactatagaatttgcaaattcagaacattttatacctaaaagtaattctgtctttcctaaagtgtttttaacatgaaaattagtaggaagatgtggttactatttggaaagtgtaatgtaacaaaactctcttttgttaccacaaattttgtgagtttagtactctacagattgccccataagagcagtagcttttgaaactcataattctctgaaataaatgaaagacatttaattcaaggatcaaaaattgtggccatctttgcaaatgactacctatagcctgtgaaaatacatttcaaaaaatgttatgtgcaatgaacactaaatttaagagcagttacagtgtgactcactcatgtttaaaaaaaatcgaagagctaaaaaatacgtctaatttatgtaacccattggaatgtatttctaggttctcttcaggattaattaaataaacatgcaatttatgaaaacatataaacaattatttatcacttttatgacccaaatcacaataaaattgtcatttaggataaactggggagaatagactgaacatatggttatattcacagttatttattaacttaaatgttattccaacattagagctaatgttaaaaagatttaaactgtaacgtctaatatttggaataatatattaaagtattagcactgtggttgattttcttgaattatgttgcatcttgtactactaagcttgtgaaaataaacatttggatgttttaaaaggtaaacattaaaaaaaaaaaaaaaaaa

SEQ ID NO: 300 - DNA, 4586 bp, Artificial Sequence
  CAMK2B
aggtgtgcggcgcgctcctggcgaggacggagcgagcagatctcgcgtgcgctcgccgcccggcgcagcccagcccggcccccgcctggcgccgcgagccgaggtgtctcccgcgcccgcgcccgtgtcgccgccgtgcccgcgagcgggagccggagtcgccgccgcccgagcgcagccgagcgcacgccgagcccgtccgccgccgccatggccaccacggtgacctgcacccgcttcaccgacgagtaccagctctacgaggatattggcaagggggctttctctgtggtccgacgctgtgtcaagctctgcaccggccatgagtatgcagccaagatcatcaacaccaagaagctgtcagccagagatcaccagaagctggagagagaggctcggatctgccgccttctgaagcattccaacatcgtgcgtctccacgacagcatctccgaggagggcttccactacctggtcttcgatctggtcactggtggggagctctttgaagacattgtggcgagagagtactacagcgaggctgatgccagtcactgtatccagcagatcctggaggccgttctccattgtcaccaaatgggggtcgtccacagagacctcaagccggagaacctgcttctggccagcaagtgcaaaggggctgcagtgaagctggcagacttcggcctagctatcgaggtgcagggggaccagcaggcatggtttggtttcgctggcacaccaggctacctgtcccctgaggtccttcgcaaagaggcgtatggcaagcctgtggacatctgggcatgtggggtgatcctgtacatcctgctcgtgggctacccacccttctgggacgaggaccagcacaagctgtaccagcagatcaaggctggtgcctatgacttcccgtcccctgagtgggacaccgtcactcctgaagccaaaaacctcatcaaccagatgctgaccatcaaccctgccaagcgcatcacagcccatgaggccctgaagcacccgtgggtctgccaacgctccacggtagcatccatgatgcacagacaggagactgtggagtgtctgaaaaagttcaatgccaggagaaagctcaagggagccatcctcaccaccatgctggccacacggaatttctcagtgggcagacagaccaccgctccggccacaatgtccaccgcggcctccggcaccaccatggggctggtggaacaagccaagagtttactcaacaagaaagcagatggagtcaagccccagacgaatagcaccaaaaacagtgcagccgccaccagccccaaagggacgcttcctcctgccgccctggagcctcaaaccaccgtcatccataacccagtggacgggattaaggagtcttctgacagtgccaataccaccatagaggatgaagacgctaaagcccccagggtccccgacatcctgagctcagtgaggaggggctcgggagccccagaagccgaggggcccctgccctgcccatctccggctccctttagccccctgccagccccatcccccaggatctctgacatcctgaactctgtgagaaggggttcaggaaccccagaagccgagggccccctctcagcggggcccccgccctgcctgtctccggctctcctaggccccctgtcctccccgtcccccaggatctctgacatcctgaactctgtgaggaggggctcagggaccccagaagccgagggcccctcgccagtggggcccccgccctgcccatctccgactatccctggccccctgcccaccccatcccggaagcaggagatcattaagaccacggagcagctcatcgaggccgtcaacaacggtgactttgaggcctacgcgaaaatctgtgacccagggctgacctcgtttgagcctgaagcactgggcaacctggttgaagggatggacttccacagattctacttcgagaacctgctggccaagaacagcaagccgatccacacgaccatcctgaacccacacgtgcacgtcattggagaggatgccgcctgcatcgcttacatccggctcacgcagtacattgacgggcagggccggccccgcaccagccagtctgaggagacccgcgtgtggcaccgccgcgacggcaagtggcagaacgtgcacttccactgctcgggcgcgcctgtggccccgctgcagtgaagagctgcgccctggtttcgccggacagagttggtgtttggagcccgactgccctcgggcacacggcctgcctgtcgcatgtttgtgtctgcctcgttccctcccctggtgcctgtgtctgcagaaaaacaagaccagatgtgatttgttaaaaaaaaacaaaaaaaaaaaaaaaaaaaacaagatgacgacgacaaccacaaaaaaaattgacatcagatgaaatgaaaaaaaaaaaaaacaaaaaaaactaaaggaaggaaaaagctgtaaaaatcactggcattcgtggggccactccccacccaagctccacgtgtgtccgtctgtgctcctggcctctgggggaccagctgggacatgaacttgtctgccaggcccccgtcgcgtgctgaacggtgttagtttgtaggtaacgcacacaccccacacctaaggtgtctgcatcctcctgccaacgcatgggctccacgtggtgtgctcgctggctgtcgtgactgtcagctgtctcttgggaggggctgtgggggcccgctgggctgcctcctttcccgctagttgtgcctgagagttgctgttgttcctgctttcccttcccttcctttcatcccctgaagggctaggtgtgggttttccgtgcccggtatccccacacacccagcacggacaacccttcggcagagcccaggccggcccctcaccccctggagtattgaaactggagtcccgtccccaaggccttcagagatgcccctacacacccagggctccagctctggtccttctgggggagtaaagtgcaaagaggggcacagcttagttttgggcctctcgccgagcaagagacagcactgctggctacagctccaacacagccagctgtggcaagaggactctgcctgggctggcccccctcctgtgtgaggtgtctgtcccttctctgctggccagcagcagatgcactggcagctcccaaccctgtttccgcccctcggccctcccccagcctgttcggcttctctgcagcccgcaagggggagcagacttttgacaaaggactgcgggcctcgctcaagtccctgagcccccagctgaagctgggaggggaggccaggctttgtgtctgggcatattcgtctgctgatggggtttggggaagcctggggcttggggtttggtcgggtggtgcagctagtggcagagcgggatcagaggtggtggctgcccagcttctgggctgagacaagggtctgtgcaggggtttactgaagtgggagtgcctttggaatctgggccgggagcagaagggagcaaaagctacagtgggagccagcctagggcacatgggaggcgtgagggcagtgctgcccgtgcagtgtcaggtgtgccagtgccttggcgggctgcagtgcgtgtgagggcaccttctaggtgggccagggatgcagctatggagataaggcgggctggggacagaaacaggtgggcacagggcccaggacaccagcggatggagggcagggtctagccctgtgctcctgagcgtcggctgcctgggttcgaggcggtgggtccccggccccttgtgatggtgtgtaccatgggggagctcggggacagggcaagcccgagcatggtggggctgcagggtgggtctgaagccaggttgggtgggggtggtcacaagccctgactgcagagggtcaggggctcctgccccagtgcctgcccactttcaattcacattgttttcaacaaggattttctttatcttcccctacaaatcaagccaagggaggggcacagaatggggaacaggacacaggatcctaaactccaaggggactgtccaccgatgaacactcagagtggacaccatcttccgtccacgctgtgcccaggacagctgtccccatccatgaacacagggtaaacatctgccgggctccgcaccagtggctccctgggccatgggacagcggcagggctcaccacggacagcacgtggcccagcagccggccaccctggcgtcctggggcctcctcccctcctctccctctcaccttgtcacctccacggagctgcctgtctgggataatttggggattttttttctgggggataattcttttgcatgacccctaaagagcaagccacaccggtctgctagctaggtgtccgcggtgtggtggtggcggccgctggccagcgctgcaaggggtcggctgcccacggtgctggctggcctcccctcctctctctttttgctgagtttcattgtcttttctttctgagccttgtaagtgtacaaaaattattcttattttgttctgtctcgggaaactgcaaataaaagaaaaacaggacaaactgc

SEQ ID NO: 301 - DNA, 1278 bp, Artificial Sequence
  AZGP1
ccattggcctgtagattcacctcccctgggcagggccccaggacccaggataatatctgtgcctcctgcccagaaccctccaagcagacacaatggtaagaatggtgcctgtcctgctgtctctgctgctgcttctgggtcctgctgtcccccaggagaaccaagatggtcgttactctctgacctatatctacactgggctgtccaagcatgttgaagacgtccccgcgtttcaggcccttggctcactcaatgacctccagttctttagatacaacagtaaagacaggaagtctcagcccatgggactctggagacaggtggaaggaatggaggattggaagcaggacagccaacttcagaaggccagggaggacatctttatggagaccctgaaagacatcgtggagtattacaacgacagtaacgggtctcacgtattgcagggaaggtttggttgtgagatcgagaataacagaagcagcggagcattctggaaatattactatgatggaaaggactacattgaattcaacaaagaaatcccagcctgggtccccttcgacccagcagcccagataaccaagcagaagtgggaggcagaaccagtctacgtgcagcgggccaaggcttacctggaggaggagtgccctgcgactctgcggaaatacctgaaatacagcaaaaatatcctggaccggcaagatcctccctctgtggtggtcaccagccaccaggccccaggagaaaagaagaaactgaagtgcctggcctacgacttctacccagggaaaattgatgtgcactggactcgggccggcgaggtgcaggagcctgagttacggggagatgttcttcacaatggaaatggcacttaccagtcctgggtggtggtggcagtgcccccgcaggacacagccccctactcctgccacgtgcagcacagcagcctggcccagcccctcgtggtgccctgggaggccagctaggaagcaagggttggaggcaatgtgggatctcagacccagtagctgcccttcctgcctgatgtgggagctgaaccacagaaatcacagtcaatggatccacaaggcctgaggagcagtgtggggggacagacaggaggtggatttggagaccgaagactgggatgcctgtcttgagtagacttggacccaaaaaatcatctcaccttgagcccacccccaccccattgtctaatctgtagaagctaataaataatcatccctccttgcctagcataaaaaaaaaaaaaaa

SEQ ID NO: 302 - DNA, 4629 bp, Artificial Sequence
  ADIPOQ
aggctgttgaggctgggccatctcctcctcacttccattctgactgcagtctgtggttctgattccataccagaggagacgggatttcaccatgttgtccaggctggtctgaaactcctgacatcagggctcaggatgctgttgctgggagctgttctactgctattagctctgcccggtcatgaccaggaaaccacgactcaagggcccggagtcctgcttcccctgcccaagggggcctgcacaggttggatggcgggcatcccagggcatccgggccataatggggccccaggccgtgatggcagagatggcacccctggtgagaagggtgagaaaggagatccaggtcttattggtcctaagggagacatcggtgaaaccggagtacccggggctgaaggtccccgaggctttccgggaatccaaggcaggaaaggagaacctggagaaggtgcctatgtataccgctcagcattcagtgtgggattggagacttacgttactatccccaacatgcccattcgctttaccaagatcttctacaatcagcaaaaccactatgatggctccactggtaaattccactgcaacattcctgggctgtactactttgcctaccacatcacagtctatatgaaggatgtgaaggtcagcctcttcaagaaggacaaggctatgctcttcacctatgatcagtaccaggaaaataatgtggaccaggcctccggctctgtgctcctgcatctggaggtgggcgaccaagtctggctccaggtgtatggggaaggagagcgtaatggactctatgctgataatgacaatgactccaccttcacaggctttcttctctaccatgacaccaactgatcaccactaactcagagcctcctccaggccaaacagccccaaagtcaattaaaggctttcagtacggttaggaagttgattattatttagttggaggcctttagatattattcattcatttactcattcatttattcattcattcatcgagtaactttaaaaaaatcatatgctatgttcccagtcctggggagcttcacaaacatgaccagataactgactagaaagaagtagttgacagtgctattttgtgcccactgtctctcctgatgctcatatcaatcctataaggcacagggaacaagcattctcctgtttttacagattgtatcctgaggctgagagagttaagtgaatgtctaaggtcacacagtattaagtgacagtgctagaaatcaaacccagagctgtggactttgttcactagactgtgcccttttatagaggtacatgttctctttggagtgttggtaggtgtctgtttcccacctcacctgagagccattgaatttgccttcctcatgaattaaaacctcccccaagcagagcttcctcagagaaagtggttctatgatgacgtcctgtcttggaaggactactactcaatggcccctgcactactctacttcctcttacctatgtcccttctcatgcctttccctccaacggggaaagccaactccatctctaagtgccgaactcatccctgttcctcaaggccacctggccaggagcttctctgatgtgatatccactttttttttttttgagatggagtctcactctgtcacccaggctggagtacagtgacacgacctcggctcactgcagcctccttctcctgggtccaagcaattattgtgcctcagcctcccgagtagctgagacttcaggtgcattccaccacacatggctaatttttgtatttttagtagaaatggggtttcgtcatgttggccaggctggtctcgaactcctggcctaggtgatccacccgcctcgacctcccaaagtgctgggattacaggcatgagccaccatgcccagtcgatatctcactttttattttgccatggatgagagtcctgggtgtgaggaacacctcccaccaggctagaggcaactgcccaggaaggactgtgcttccgtcacctctaaatcccttgcagatccttgataaatgcctcatgaagaccaatctcttgaatcccatatctacccagaattaactccattccagtctctgcatgtaatcagttttatccacagaaacattttcattttaggaaatccctggttttaagtatcaatccttgttcagctggacaatatgaatcttttccactgaagttagggatgactgtgattttcagaacacgtccagaatttttcatcaagaaggtagcttgagcctgaaatgcaaaacccatggaggaattctgaagccattgtctccttgagtaccaacagggtcagggaagactgggcctcctgaatttattattgttctttaagaattacaggttgaggtagttgatggtggtaaacattctctcaggagacaataactccagtgatgttcttcaaagattttagcaaaaacagagtaaatagcattctctatcaatatataaatttaaaaaactatctttttgcttacagttttaaattctgaacaattctctcttatatgtgtattgctaatcattaaggtattattttttccacatataaagctttgtctttttgttgttgttgttgtttttaagatggagtttccctctgttgccaggctagagtgcagtggcatgatctcggcttactgcaacctttgcctcccaggttcaagcgattcttctgcctcagcctcccgagtagctgggaccacaggtgcctaccaccatgccaggctaatttttgtatttttagtaaagacagggtttcaccatattggccaggctggtctcgaactcctgaccttgtgatctgcccgcctccatttttgttgttattttttgagaaagatagatatgaggtttagagagggatgaagaggtgagagtaagccttgtgttagtcagaactctgtgttgtgaatgtcattcacaacagaaaacccaaaatattatgcaaactactgtaagcaagaaaaataaaggaaaaatggaaacatttattcctttgcataatagaaattaccagagttgttctgtctttagataaggtttgaaccaaagctcaaaacaatcaagacccttttctgtatgtccttctgttctgccttccgcagtgtaggctttaccctcaggtgctacacagtatagttctagggtttccctcccgatatcaaaaagactgtggcctgcccagctctcgtatccccaagccacaccatctggctaaatggacatcatgttttctggtgatgcccaaagaggagagaggaagctctctttcccagatgccccagcaagtgtaaccttgcatctcattgctctggctgagttgtgtgcctgtttctgaccaatcactgagtcaggaggatgaaatattcatattgacttaattgcagcttaagttaggggtatgtagaggtattttccctaaagcaaaattgggacactgttatcagaaataggagagtggatgatagatgcaaaataatacctgtccacaacaaactcttaatgctgtgtttgagctttcatgagtttcccagagagacatagctggaaaattcctattgattttctctaaaatttcaacaagtagctaaagtctggctatgctcacagtctcacatctggttggggtgggctccttacagaacacgctttcacagttaccctaaactctctggggcagggttattcctttgtggaaccagaggcacagagagagtcaactgaggccaaaagaggcctgagagaaactgaggtcaagatttcaggattaatggtcctgtgatgctttgaagtacaattgtggatttgtccaattctctttagttctgtcagcttttgcttcatatattttagcgctctattattagatatatacatgtttagtattatgtcttattggtgcatttactctcttatcattatgtaatgtccttctttatctgtgataattttctgtgttctgaagtctactttgtctaaaaataacatacgcactcaacttccttttctttcttccttcctttctttcttccttcctttctttctctctctctctctttccttccttccttcctccttttctttctctctctctctctctctctttttttgacagactctcgttctgtggccctggctggagttcagtggtgtgatcttggctcactgctacctctaccatgagcaattctcctgcctcagcctcccaagtagctggaactacaggctcatgccactgcgcccagctaatttttgtatttttcgtagagacggggtttcaccacattcgtcaggttggtttcaaactcctgactttgtgatccacccgcctcggcctcccaaagtgctgggattacaggcatgagccatcacacctggtcaactttcttttgattagtgtttttgtggtatatctttttccatcatgttactttaaatatatctatattattgtatttaaaatgtgtttcttacagactgcatgtagttgggtataatttttatccagtctaaaaatatctgtcttttaattggtgtttagacaatttatatttaataaaattgttgaatttaa

SEQ ID NO: 303 - DNA, 1074 bp, Artificial Sequence
  IGLL5
agccggctgtggtgggaggcagttgagccctggattgtgaccgcttcagggcagttggtagatgcccctctgggagagatccccaggggtgacagccatggaccctggaagggcctgggctagggacagggaccagagccagtccagggagaggacagagccaatggactggggtgtactgtaacagccctgctggcgagagggaccagggcaccgtcctccagggagcccatgctgcaagtcgggccagaggtgcccctgaacctgaaggccaatgagacccaagacaggccaagtgggttgtgagacccctgaggagctgggccctggtcccaggcagcgctggcccctgctgctgctgggtctggccatggtcgcccatggcctgctgcgcccaatggttgcaccgcaaagcggggacccagaccctggagcctcagttggaagcagccgatccagcctgcggagcctgtggggcaggctcctgctccagcccagcccccagagagcagaccccaggtgctggccccgggggttttggtctgagcctcagtcactgtgttatgtcttcggaactgggaccaaggtcaccgtcctaggtcagcccaaggccaaccccactgtcactctgttcccgccctcctctgaggagctccaagccaacaaggccacactagtgtgtctgatcagtgacttctacccgggagctgtgacagtggcctggaaggcagatggcagccccgtcaaggcgggagtggagaccaccaaaccctccaaacagagcaacaacaagtacgcggccagcagctacctgagcctgacgcccgagcagtggaagtcccacagaagctacagctgccaggtcacgcatgaagggagcaccgtggagaagacagtggcccctacagaatgttcataggttcccaactctaaccccacccacgggagcctggagctgcaggatcccaggggaggggtctctctccccatcccaagtcatccagcccttctccctgcactcatgaaaccccaataaatatcctcattgacaaccagaaaaaaaaaaaaaaaaaa

SEQ ID NO: 304 - DNA, 9571 bp, Artificial Sequence
  BCAT1
agtagggaggtgggcaggagccagtgatgacggaatggcaatcacatttgacctctgatctgtttatttcctcctccttgacgtctccatataaatgttacacgggcatccccacactcggatacgcacccacagtggctgattcgggggtaaccgtgtcatttgcttgcaacactggcacctctgccctgcaccccgggagtgagcagtgagtgaggctcgggtctgggcgctggctccgaatcttcgggctgggagagactccaccatctgggggcggcctgggggagcagccttagtgtcttcctgctgatgcaatccgctaggtcgcgagtctccgccgcgagagggccggtctgcaatccagcccgccacgtgtactcgccgccgcctcgggcactgccccaggtcttgctgcagccgggaccgcgctctgcagccgcagacccggtccacacggccaggggctacgacccttgggatctgccctccgctcagctcgagcttccctcgtggccgacggaacaatgaaggattgcagtaacggatgctccgcagagtgtaccggagaaggaggatcaaaagaggtggtggggacttttaaggctaaagacctaatagtcacaccagctaccattttaaaggaaaaaccagaccccaataatctggtttttggaactgtgttcacggatcatatgctgacggtggagtggtcctcagagtttggatgggagaaacctcatatcaagcctcttcagaacctgtcattgcaccctggctcatcagctttgcactatgcagtggaagtatttgacaaagaagagctcttagagtgtattcaacagcttgtgaaattggatcaagaatgggtcccatattcaacatctgctagtctgtatattcgtcctacattcattggaactgagccttctcttggagtcaagaagcctaccaaagccctgctctttgtactcttgagcccagtgggaccttatttttcaagtggaacctttaatccagtgtccctgtgggccaatcccaagtatgtaagagcctggaaaggtggaactggggactgcaagatgggagggaattacggctcatctctttttgcccaatgtgaagcagtagataatgggtgtcagcaggtcctgtggctctatggagaggaccatcagatcactgaagtgggaactatgaatctttttctttactggataaatgaagatggagaagaagaactggcaactcctccactagatggcatcattcttccaggagtgacaaggcggtgcattctggacctggcacatcagtggggtgaatttaaggtgtcagagagatacctcaccatggatgacttgacaacagccctggaggggaacagagtgagagagatgtttggctctggtacagcctgtgttgtttgcccagtttctgatatactgtacaaaggcgagacaatacacattccaactatggagaatggtcctaagctggcaagccgcatcttgagcaaattaactgatatccagtatggaagagaagagagcgactggacaattgtgctatcctgaatggaaaatagaggatacaatggaaaatagaggataccaactgtatgctactgggacagactgttgcatttgaattgtgatagatttctttggctacctgtgcataatgtagtttgtagtatcaatgtgttacaagagtgattgtttcttcatgccagagaaaatgaattgcaatcatcaaatggtgtttcataacttggtagtagtaacttaccttaccttacctagaaaaacattaatgtaagccatataacatgggattttcctcaatgattttagtgcctccttttgtacttcactcagatactaaatagtagtttattctttaatataagttacattctgctcctcaaacaaatgcaattttttgtgtgtgtttgaaagctaatttgagaaaatttcataggttacatttcctgcagcctatctttatccacagaaagtgttttcttttttttaaatcaagacttttaaaactggatttcctcccatcactgttttttgaaggtcctccaagtccgtgttaaggtaaatatctgttttcttcctgatgtcacagcctgagcatactctgtgcattaggaagacctgagtgcatttcccaccattgtcctttccacattatgttgtagctggctggctgtcaggcgactacaagactgagggtcttgtgccttatagatctttgtatcccccatggctgacatatagtaggtactcagtaaatggttttataatgaatcagtgaacattttgcttctatagaagtgtaccttctttgtttctatattatgaaacctctttattagaatttgtgattgattctgacagtgtatagatttaccttatattgtctttattttccatgagctactaagtcattagagatactctgaagcatagttagtttaggaaatcacttcatattgattgtattagaattatcttggaattgaagatatatccctagagcaggggaccccaacccccaggccatgggccacacagcaggaagaggtgagtggtgggccattgaggagcttcatctgtatttatggctacttcccatcactcgaattaccacctgaactccacctcttgtcagctcagtggcagcattagattctcataggagcacaaatcctattgtgaactctgcatgcaagggatctaggctatgcgctccttatgagaatctaatgcttgatgacctgaggtgtaacagtttcatcctgaaaccacccttcaccctgcagtctgtggaaaaattgtcttccacaaaactggtccctggtgccaaaaatgttggggaccactgctctagagagaggtcatgatatcataccaaccaaatggaaatgacaaatgttttatgtcaagtgttaattgcagaaataaatcttttttttttttttttggtagaaaacaaagaggcatactctgatttttatactctgtttttgcaggtgctcttttctttgaatggagatttgatgagcaagtggttaggatgcagggagagctactatgggtgatattttccttgtttaggagctgtgagttaaaattgtatcctttgtggtttatctaaggaaagtcaaatcttgacagaaaacatttttccttggaaggtcaactctcagacattgtattttggtttccctcagtcctcataacttccttcttgctgaacatattttattctcttttcagagaaggaaaataaaaaggattctaaaagtttgatgcattggaaaaatttccttgaggcatttagcaacacatagaaaatgggctttgattcttttccaaaacttttagccatagggtcttttatagacagggatagtaaaatgaaaattgagaaatataagatgaaaaggaatgataaaaatatcttttagggggcttttaattggtgatctgaaatcttgggagaagctgttcttttcaggcctgaggtgctcttgactgtcgcctgcgcactgtgtaccccgagcaacattctaagggtgtgctttcgccttggctaactcctttgacctcattcttcatatagtagtctaggaaaaagttgcaggtaatttaaactgtctagtggtacatagtaactaaatttctattcctatgagaaatgagaattatttatttgccatcaacacattttatactttgcatctccaaatttattgtggcgagacttgtccattgtgaaagttagagaacattatgtttgtatcatttctttcataaaacctcaagagcatttttaagcccttttcatcagacccagtgaaaactaaggatagatgtttaaaaactggaggtctcctgataaggagaacacaatccaccattgtcatttaagtaataagacaggaaattgaccttgacgctttcttgttaaatagatttaacaggaacatctgcacatcttttttccttgtgcactatttgtttaattgcagtggattaatacagcaagagtgccacattataactaggcaattatccattcttcaagacttagttattgtcacactaattgatcgtttaaggcataagatggtctagcattaggaacatgtgaagctaatctgctcaaaaagatcaacaaattaatattgttgctgatatttgcataattggctgcaattatttaatgtttaattgggttgatcaaatgagattcagcaattcacaagtgcattaatataaacagaactggtggcacttaaaatgataatgattaacttatattgcatgttctcttcctttcacttttttcagtttctacatttcagaccgagcttgtcagcttttttgaaaacacatcagtagaaaccaagattttaaaatgaagtgtcaagacaaaggcaaaacctgagcagttcctaaaaagatttgctgttagaaattttctttgtggcagtcatttattaaggattcaactcgtgatacaccaaaagaagagttgacttcagagatgtgttccatgctctctagcacaggaatgaataaatttataacacctgctttagcctttgttttcaaaagcacaaaggaaaagtgaaagggaaagagaaacaagtgactgagaagtcttgttaaggaatcaggttttttctacctggtaaacattctctattcttttctcaaaagattgctgtaagaaaaaatgtaagacaaaaaaaaaaaaaaaaaacaaacagaggcagaggcaggcagtagcaagaaagcagagcgtaacatcagctagatggtaacatgcaatgtcagctctcttgaagacatgggaaacctaagttacaccttgggttaaaattcttcaccatattagttttgttgcttcataaaatttacctaagcaagtggtcttgcttgcctcaaatccaagcagtcttgaacacttggaggcaattaatgagtatatcttagtcaaaagaattgttggagctttttattaaagctacagtttcagttctgcttttggggaattgtgctatgaaagcagctgccaaaataagctcatttattttcttcaatcccactcagtgctcagtcactatattctgtttcctttttttttttcaagttgcatatttggtttccccttatgattgggaaagatgaattttcagcagaaaacattgtttgttcactttcaaagagtgatagtttctaaaacatttagagcaataaatattcatcagaggtaccaagtaagccggcagaagagttaagggttagagaaatcccttatttcatgtcttgactctaaaattatcaaagtacttttccttgtaatgtggatttcttcttatgcggatatgcaaaaacttcagttatacgtagtaatgctagcaggtaattttagtagacattttataacaactgtcactttgtttcgccacatgtagagtttgttcagctattttccagatatctccccacaaaaggaggcaaagggtaccagcttttcaatgagcattacctattacttggcaaagatgatgaagactctattaatagttcatttgataaatgttgacataaccaacaatagagattaggaagttagttttaagaaatcaatggcatatagacattaccctcatggagtttgtattctactacttgaactgattgtagctataaaagcatagttagatagctgaatagttagatcataagcaaagaaggccagaacacatctcttatcaagaaatcaatgaatagtttatctcatttttaaagcaactttatccttctttaattccttcctttcttctagtgcaaaactacttaataaggttggtgtttaggttagtgttcacaccattcctcatctggtgtgaattaccttctctttctttactatttactaccaacctagtacatgtgttgactgaattcttttcaaacaatgttgagttatcatggtgcacctaataaattaacaccacagattacagcatccttgctgattttctcagcaaagccagattagatggaaataaacaaagaaaatgatcctagagtgaatttttctagaaaatatctattatgaaccatgctgtttaaagtattagcttgaaggtgatggatccagctattcagaaaataactttcatataaccatgattttgcacagtatgaggtcttaaatgtgtggaaagagataaattttttatcattaccacaaaccccttttaaagattcaaaggtggaagaaagtgatttattttttctcttcagcatacatatataaaagacttgtcagatgtttaatttggggaggttgataatgaaacatatcaacagagtatagtagttatagtagtgtttgtgggtaaataatttcctggggtcagacatatataaacatatttgcttcaaaatgataaaggcatgaaatcagtcttaaaaattgaaatgggggtgatgggggagaaaaagaagaacaaatttgaagtgccctttcaaatctgctggatacaagtattgaagttttaagtcatcttattctgtctgaaagtgtatttttcattctacaatagacccaatcaacaagacgtataacttgagttgcatgatgttcagtttatgtaatctactgttgggatggtaagaattgatgtaggctgtggtgtaagaatgaattaaaatatagtttcactggcttttctctacatatccactatcacaatggctaggtttcctgttgctcactattggattctggagaaaaatttaatgaaagatgatatcagaggaagaataagtggaggtagagaagaaaggaatgatagaggaggggaaaaaaacaaaacatatttttgtgttatccaaaggagctttttccttattctgtcaagcattgagatcttcttcagctttcaatgtagttgctaaatacaaataatgctactaggtagtgactaaatatagcaaacacttcatcagatattagaattaggtcacactattgaggttataatctgaaggttgtgttacatagaaaccactttagattattatcaacttggactaggctttattttataatagcatagtaagtaatatctattgtgtcatttcttcaaccattttattctaagatccatgaagcttcttgaggccaaataaaataataagtttagacaagaagtagattgtgacttttttcccttagagatactatttactatctcctatcctgataggtggaaggtttactgaattggaaattggttgactattagtttttaactaaaatgtgcaataacacattgcagtttcctcaaactagtttcctatgatcattaaactcattctcagggttaagaaaggaatgtaaatttctgcctcaatttgtacttcatcaataagtttttgaagagtgcagatttttagtcaggtcttaaaaataaactcacaaatctggatgcatttctaaattctgcaaatgtttcctggggtgacttaacaaggaataatcccacaatatacctagctacctaatacatggagctggggctcaacccactgtttttaaggatttgcgcttacttgtggctgaggaaaaataagtagttcgaggaagtagtttttaaatgtgagcttatagatagaaacagaatatcaacttaattatgaaattgttagaacctgttctcttgtatctgaatctgattgcaattactattgtactgatagactccagccattgcaagtctcagatatcttagctgtgtagtgattcttgaaattctttttaagaaaaattgagtagaaagaaataaaccctttgtaaatgaggcttggcttttgtgaaagatcatccgcaggctatgttaaaaggattttagctcactaaaagtgtaataatggaaatgtggaaaatatcgtaggtaaaggaaactacctcatgctctgaaggttttgtagaagcacaattaaacatctaaaatggctttgttacaccagagccatctggtgtgaagaactctatatttgtatgttgagagggcatggaataattgtattttgctggcaatagacacattctttattatttgcagattcctcatcaaatctgtaattatgcacagtttctgttatcaataaaacaaaagaatcctgtttgtgtggtttcatgaaatcagcattgttgaatgcatgaagtaataatgctaaattaacatttttatgatgtctcaaggtttctggtcaagggaagtaaatgtaggatagtatttttacaccaaaatgacacagagagaattgagcacaccagaaagaccagaaaccacaccactggatagagattcaatatgtttctttttcaaacatttggacaagaaaaaaatgggcatttaaaaattcttccttcccctggttatggatttatctgtagtaaaacttagctttgtcgtttgagatttgcacagaatggggggagtagattacctcttcccattcattgtcataatggatctacatcactgataaacaccatacttctatatgtggttaactagctttagaataaaagacactttaaaaagtaaaaggcctagagatcttcaatgaagtgtcccttttagccaaaccaggccttgcagaaattgtcctcaaaagcaccaagggagaacaaagccaagtgcagaattacccaagggtcacacattttgtattcattttcttataatttgcccaaatgatttgaagtacagcaaaacctgaagttttgcaaagagttactgtaaactgaacttaaaaatgtcagagtgctcggtgacccacttctccagaccctgtcaacctgtgaaaatattggcctttattcagatctctcaagaagttacgcgcagagtttggaaggtctaggcaaaggttattagtcaagtgttcttacagtgtcaacgctcaattcccacaagcgtgagaaagagagacctgtcattcctgagggtgatgacatacatttactggagcttatataatttatcagataagacagcagtttccttcagggtagaaagtgtgttttctacattgatttagtacaaaacaaaaagaaaaggggatatttcaaattttataattatttttctgctaagctgattcagtgtgatttaagcatatttttcaaatcatgaatctgattccatatacatatgtgccttatattgtgataatttatttttaagtgaaatatgctatcatagcctgactttatgtatagtggtgacaacttgcaggatcgcatttctgtaaccaaacggccgacagctgaggtgtagatgcttcctatggtctgtagaataatcactgggcttgttctctagctatgtctgtatgcaatcgcgacagtgttgatcaaaacccatgatcattctctccaaaggtctttgtcactaagccactagggattctgaaaagttcgtgagctgaaacaaataaattgagttggaagattaaaaaaaaaa

SEQ ID NO: 305 - DNA, 1900 bp, Artificial Sequence
  SUFU
accctctggcagactcggcggcggcgacagcctgggcggacagtgcgccgtgcgcaggcgcggagctagacctcgctgcagcccccatcgcctcggggagtctcacccaccgagtccgcccgctggcccgtcagtgctctccccgtcgtttgccctctccagttcccccagtgcctgccctacgcaccccgatggcggagctgcggcctagcggcgcccccggccccaccgcgcccccggcccctggcccgactgcccccccggccttcgcttcgctctttcccccgggactgcacgccatctacggagagtgccgccgcctttaccctgaccagccgaacccgctccaggttaccgctatcgtcaagtactggttgggtggcccagaccccttggactatgttagcatgtacaggaatgtggggagcccttctgctaacatccccgagcactggcactacatcagcttcggcctgagtgatctctatggtgacaacagagtccatgagtttacaggaacagatggacctagtggttttggctttgagttgacctttcgtctgaagagagaaactggggagtctgccccaccaacatggcccgcagagttaatgcagggcttggcacgatacgtgttccagtcagagaacaccttctgcagtggggaccatgtgtcctggcacagccctttggataacagtgagtcaagaattcagcacatgctgctgacagaggacccacagatgcagcccgtgcagacaccctttggggtagttaccttcctccagatcgttggtgtctgcactgaagagctacactcagcccagcagtggaacgggcagggcatcctggagctgctgcggacagtgcctattgctggcggcccctggctgataactgacatgcggaggggagagaccatatttgagatcgatccacacctgcaagagagagttgacaaaggcatcgagacagatggctccaacctgagtggtgtcagtgccaagtgtgcctgggatgacctgagccggccccccgaggatgacgaggacagccggagcatctgcatcggcacacagccccggcgactctctggcaaagacacagagcagatccgggagaccctgaggagaggactcgagatcaacagcaaacctgtccttccaccaatcaaccctcagcggcagaatggcctcgcccacgaccgggccccgagccgcaaagacagcctggaaagtgacagctccacggccatcattccccatgagctgattcgcacgcggcagcttgagagcgtacatctgaaattcaaccaggagtccggagccctcattcctctctgcctaaggggcaggctcctgcatggacggcactttacatataaaagtatcacaggtgacatggccatcacgtttgtctccacgggagtggaaggcgcctttgccactgaggagcatccttacgcggctcatggaccctggttacaactctgaacctatcctcggagctctgccctcccgtcctggaacgtctttctgccctgaggagagggtagtcagcatctccaattttcagcagctcaagaaccttggcccccacaggacttcgcagatgtcacattgcccctcagtcccctgaatgcccttcggacccaaccccaattccccaagcccctgaccccctagctgccggggttcccactcccagtgccacaaccccctcacctccctggcagcccctcagcgagcctgaggcccagcacccgctggctccccagcacatggtcccctcccatgggctgttgcccagggaaccggggcgcggtgggaacgagctgctggcctcggcatgtttcaataaagttgctgtgctgggagctactcaaaaaaaaaaaaaaaaa

SEQ ID NO: 306 - DNA, 5753 bp, Artificial Sequence
  CPEB3
acagttgtcaaagtgcttttgccagagcggtcacataatcaacctgaaagaagaaaataaatactgtatacttttaaattttatcgattcttaaaaactggacactcaaagctgcgcaaaccatgcaggatgatttactgatggacaaaagcaaaacccagccccagccccagcagcagcagcggcagcagcagcagccccaacctgagtccagcgtatccgaagccccgtccacgcccctctcctcagagacccccaagccggaggaaaacagcgcagtgccggccctcagcccagccgctgcccccccggcccccaacggcccggacaagatgcagatggaatcaccgctcctgccaggcttgagtttccatcagcctcctcagcagccgccgccgcctcaggagcccgcggcaccgggcgcgtcgctgtcgccgtccttcggcagcacctggtccacgggcaccaccaacgcggtagaggacagcttcttccaggggatcaccccagtcaacgggaccatgctcttccagaacttcccgcaccatgtcaacccagtcttcggaggcactttctccccgcagatcggcctggcgcagacccagcaccaccagcagccgccgccgcctgcgcccgcgccgcagccggcacagccagcgcagccaccacaggcgcagcccccgcagcagcgccgctcacccgccagccccagccaggcgccctacgcgcagaggagcgccgccgcggcgtacggccaccagcccatcatgaccagcaagccgtcctcgtcttcggcggttgcagccgctgctgccgcagccgccgcctcgtcggcctcgtccagctggaacacgcaccaaagcgtgaatgcagcctggagcgcaccgtccaacccctggggcggcctgcaggcgggccgggaccctcgccgggcggtcggtgtgggcgtgggtgtgggtgtcggggtgccttccccgctcaaccccatctcgccgctcaaaaagcccttctccagcaacgtgatcgcgccgcccaagttccctcgcgcggcccctctcacttccaagtcctggatggaggataacgctttccggaccgataatggtaacaatctgttgccatttcaggaccggagtaggccctatgatacttttaacttgcactcgttggagaactccttaatggatatgataaggactgatcatgaacctctgaaaggacgcatggggataaatttccatcatccaggaacagataatattatggcacttaacagtcgatcttctctctttccctttgaagatgccttcctggatgatagccatggtgatcaagccttgtcatctggcttaagttctcccactcgctgtcaaaatggggaacgagtagaacgctactctagaaaggtgtttgttggaggacttcctcctgatattgatgaagatgagatcactgccagctttcgcaggtttggacctctcgtagtagactggcctcacaaagctgaaagcaagtcttattttcctcctaaaggctatgcctttctgctgttccaagaggaaagctcagtacaagctttgatagatgcctgcctagaagaagatgggaaactctacctgtgtgtgtcaagccccaccatcaaggacaagccagtgcaaattcgaccatggaacctaagtgacagtgactttgtaatggatggttctcagcctttggaccccagaaaaactatctttgttgggggagttccacgaccccttcgagctgttgaactggcaatgatcatggaccgtttgtacggtggtgtctgctatgctggcattgatacggacccagagctgaagtaccccaaaggtgctggccgcgtggcattctccaatcagcagagttacattgcagccatcagcgctcgttttgtgcagcttcagcacaatgacattgacaaacgggttgaagtaaagccatatgtgctggatgatcagatgtgtgatgagtgccagggcacacgctgtggtgggaagtttgccccgttcttctgtgccaacgtcacctgtctgcagtattactgtgaatactgctgggcgagcatacattcccgagccgggcgggagttccacaaaccgctggtgaaggagggaggcgaccgccctcgtcacgtcccgttccgctggagctgagccacgggccgacccagccacaagtactggagtagataacaaggagggaaaagagagggcactgcctcagggcttacagtgttctggaaatctgtgcattcgttctcgatttttaaagaagaattgggtctttttattattattattattatttacagtcatattactgaactcagtgtccagtataatgcagaattgcagagtgtagaatggtactgatttgcactttgattcacacctttgtctgcttggtaccttaattttttatacctgatttgtcactcgtgacagtatgtagactgccattctcatcagcggccgtcaggctactgtctgtgattcttttgtttgttgttgtggtgttgttctgattgttttgaactggagcatgcacttattttcagaaacttagagagttgcccctaggacaagacttaccaaaggtaatactcgtgagtaggtggcagatgtagcaaaaacttcacaacaattcagcaatcattagctcgggtcacttagagtaaggataacccttcatgaaaataagcctttagttgctctctattttgacttgtaaggatacctcataagctggatcttttatttttccttcatgtttgatttttgttttgccgaggattttggttagatcttttagtattatgtaaatttatgctgcaatagcttttgctgctattaaaatggtattattaataccataatactctattcaggctaggatatcaattaaacacaaaaacccaacaacacacttttgtgattttagggatagagtcagctgccgaacggagatcagaatagacttcagaaagcttcggtggaaggtcactatttctgactgcatgtttacttaatcaggttgctgcatgcaataaattttatatccaatgtctagtataaaacgttcccacaatgcacaaattaagaatctatataagctataaaaatactcattttttaaaaaaagtttttttcattcaaagaattggtaattgaccggaggaaggcatgcctcaataaatggaatgctctgaatgggaagagcccataacagaatgacctatattacaaccgatataaaacctaggtgtaggatattcttcaagcaaatttgtggatggtagatgaagtactttgcggtgctctgttatatattgtgaaatttattttatatagtaaagtgattatgtctaactgtgatcaaacttaactgtttaaagcctctgtcagacattaatgaacttgacagttcataactgatatattataaactaacacatgagctcttagttacaatctcttagtgcttgcaccattttacatagcttcagaccttgtccagaaaaccaaagagctcatcttagcttacaaacactaagaatatatacaggatatagagataagttgtcagattgacaaactaggcacatttttaagaaagttgtgtaatggtgatgctaaagaaatgtctgtacaaaataagatggcctgggcagagttggttgtctgagtgagaaactaactacttaattccctggatttatcctgttaagcttgagtagaatgaaggcctgctagcactagcgtggtctagaatgaaggcctgctagcactagcgtggacatttttctagcattcacccttgggctgcagatagtaatatataaacacacacaatgattgcaagactatgtaaatctttttttaatcttcttcctatgttttggaattctggggacaatctgactggatatgacactgcagaatagatttaagtcgctgtgttttctgtgctgtgatgtccttgtactgtcttaagttagtgttgcttgtttttgttttgttctcccatgtttagttgcaattactggctctcaagctatagtttgttttcaaaaaggaaaaacaaaatagttttttactggattaaaaatgcttattttagaatcctcccctttttgaggctttttggtaataattgcttttttccagcccaggtgtggttttgtttgtttttttctatgtttgtgggttttttttcatctgtacaagaaattttgttatgcactactactttttgtattctagacagttttcaaaagttggcagatttttttttttgtttttaaggaaaaaggcatgctttctgactgacatgatcttttgcaatacctcaattttgaaatataggaaagaaaatgatattttctaagtaagtttattcagaaaaatatatattaatttaattctgcaagaaaatgatttaacagatgggtaactttatttttttcatgcttatttgtgttttttgaaaatgaagaagttagagctttataactataatattaaagatcatatctaacctacagaaatctacctaattatgtgaaagaagcaaaactttttgaagaagcacccctctttcatgtattaaaataacactgagatttttttaaaagctggaagattgtacagcataaagctaaagtgaaggcaaaaaacattgtcctgaagaataggttacaaaaaataaactccatttggtgctgaaagttgtgaatagatggtggaaactactttcccttaatttgtatatttctaatcaagtgttgattgtgcgcgactgaccaggattgtgaaagagttcttctgtttgtatttttttaaagagaacttttttagtttattaaattataacatgttcccttttgttttgtaaataaatgtgcccccaagttgttaatgttatattaaaagagagggtccttcaaaaaaattattttttaaaacacagaggtgttctgacctgcaacttgactgggaagcccctgggtaacacaggtcctgctgtggcctttccttggtgtgacacttgaactagtcgattttttgaaggctataacctaacctcgactatttgttgttatgtgcaatactgtttgtactgtttgtataaaaaatagaaaaaaaaaagaaaagaaaaaaggcataaatctttattgcagatttattttcattgcaaactttagacattgtgattcactgaaatcatttttctactgtcaaatatgtaccttttcttcatgctggtattttttcaatagtaatgtagcctttgtactgagacaaattttcattgttatttttagaaagattttttgctaagaaaaaaattaaacatatttacatatttttcattttatttcgtattttctttaaggagtgctttctcaatcattaatagagttgtttctgggagggactttcatatctggtcaatgtcataatattattttgtatttttattggaataaattaattttatgatgctaattctttaaaagtttatttttttcattttcagttatttttgaagctaaaacctttgtaatattgttactaaagtgtctagttttttgaaatgcaaagctttatgtattaacttgctgatgtggtttacaatagtgtgacaacgatgaaaatgcttggttatgtaaagtgattggaaatgtaatggataattgggtaataaaatgacagaatgagcagaaaaaa

SEQ ID NO: 307 - DNA, 3451 bp, Artificial Sequence
  FGB
agatatatataggattgaagatctctcagttaagtctacatgaaaaggatggtttcttggagcttccacaaacttaaaaccatgaaacatctattattgctactattgtgtgtttttctagttaagtcccaaggtgtcaacgacaatgaggagggtttcttcagtgcccgtggtcatcgaccccttgacaagaagagagaagaggctttgctacaacaggaaaggccaatcagaaatagtgttgatgagttaaataacaatgtggaagctgtttcccagacctcctcttcttcctttcagtacatgtatttgctgaaagacctgtggcaaaagaggcagaagcaagtaaaagataatgaaaatgtagtcaatgagtactcctcagaactggaaaagcaccaattatatatagatgagactgtgaatagcaatatcccaactaaccttcgtgtgcttcgttcaatcctggaaaacctgagaagcaaaatacaaaagttagaatctgatgtctcagctcaaatggaatattgtcgcaccccatgcactgtcagttgcaatattcctgtggtgtctggcaaagaatgtgaggaaattatcaggaaaggaggtgaaacatctgaaatgtatctcattcaacctgacagttctgtcaaaccgtatagagtatactgtgacatgaatacagaaaatggaggatggacagtgattcagaaccgtcaagacggtagtgttgactttggcaggaaatgggatccatataaacagggatttggaaatgttgcaaccaacacagatgggaagaattactgtggcctaccaggtgaatattggcttggaaatgataaaattagccagcttaccaggatgggacccacagaacttttgatagaaatggaggactggaaaggagacaaagtaaaggctcactatggaggattcactgtacagaatgaagccaacaaataccagatctcagtgaacaaatacagaggaacagccggtaatgccctcatggatggagcatctcagctgatgggagaaaacaggaccatgaccattcacaacggcatgttcttcagcacgtatgacagagacaatgacggctggttaacatcagatcccagaaaacagtgttctaaagaagacggtggtggatggtggtataatagatgtcatgcagccaatccaaacggcagatactactggggtggacagtacacctgggacatggcaaagcatggcacagatgatggtgtagtatggatgaattggaaggggtcatggtactcaatgaggaagatgagtatgaagatcaggcccttcttcccacagcaatagtccccaatacgtagatttttgctcttctgtatgtgacaacatttttgtacattatgttattggaattttctttcatacattatattcctctaaaactctcaagcagacgtgagtgtgactttttgaaaaaagtataggataaattacattaaaatagcacatgattttcttttgttttcttcatttctcttgctcaccaagaagtaacaaaagtatagttttgacagagttggtgttcataatttcagttctagttgattgcgagaattttcaaataaggaagaggggtcttttatccttgtcgtaggaaaaccatgacggaaaggaaaaactgatgtttaaaagtccacttttaaaactatatttatttatgtaggatctgtcaaagaaaacttccaaaaagatttattaattaaaccagactctgttgcaataagttaatgttttcttgttttgtaatccacacattcaatgagttaggctttgcacttgtaaggaaggagaagcgttcacaacctcaaatagctaataaaccggtcttgaatatttgaagatttaaaatctgactctaggacgggcacggtggctcacgactataatcccaacactttgggaggctgaggcgggcggtcacaaggtcaggagttcaagaccagcctgaccaatatggtgaaaccccatctctactaaaaatacaaaaattagccaggcgtggtggcaggtgcctgtagtcccagctacctgtgaggtggagattgcattgagccaagatctcaacactgcactccagcctgggcaacagcgtgagactccacctcaaaaaaaaaaaaaaaagaatctgactatataccatggaaaagccaccactctgccacttaaataaacatcaggatcagagattccaagaggacaatctgcatcaagtcttcaccaagtgttttttaagcgaaataatgaaatagggagcagaatatgcctgttgcccatagaaacgaggtctattcttgtcctcaattaggcttttttttcttcatagttacaccagaactaaagtaaaagtggtttttctgttctttctacttctccccatgaaatgggcatatcatctcaacacttcactccaagtcgccacgggcaaccttatgaccctaggtcctccacccctaatgtatcatcattgccacccatttttatggtacttattgttcttaagcttatcctcttaatcttttcatgtaagcaaagctcattaatttctgtcttggaaatgctactactctctttaattactcaccaaatccaactttaacttttgacctggtttctctgccacaagttctgtcccactggagcccatactcacctaccgctttgccatcacatttaacagaaaactcttatcaacttacttcctgcttaacattagctccttcctatctatatccaaatttcttaaattcaaattttttagctggagtaaaaatggtcccagtaccatttcctgttcccttcactataacctacatttttgtcacattaagtttttccccattccaggacaggtcaggccctttaaaaatttcaacagctttattgagatataattgatataatttaaaaaatcctgcacatgtgtcatgctggagccctattgattccaacagggatggcgccttgtccaagaagagacccagagccagtgaatgggacatagggtttatttaggacttaaatacagatgtggtccagtggcagtgggctggacaggaccgctactatttgtaaagagtatgtagtttatataacatttctacttagcactctccacttagcaacctccatttaacccaaaataaaaggccttggttccttgcacatcctgagttccaacggacaggcagggagttcaagtgtccttcacagataagaagtgaatctctctgggttggccattcccggattccttagcttagactctgaacacatattcttcttagaccatacagtcattctcagggtatgcttgagttaatgctgtcggatgcatctgtcatacaaagtgtttaacatatacgatttcatgattttggaaatatgcatacacccatgatat

SEQ ID NO: 308 - DNA, 5586 bp, Artificial Sequence
  TUT7
aatcgcgcacaatgagacagcgctgagcgccggaagtggggccgaaggaaaacacggagagggagcccggccgggacaggaagaggctggggaccgcggcgaaggtggtgcaaagtaagaaaattgaagtcaaagaccatgggagatacagcaaaaccttatttcgtgaagcgcactaaagaccgggggactatggatgatgatgacttcagaaggggtcacccccaacaagattatttaataatagatgaccatgctaaaggccatggcagtaaaatggaaaagggccttcaaaaaaagaagataacaccagggaactatgggaatacccccagaaaaggaccatgtgctgtttccagcaatccatatgcatttaaaaacccaatctacagtcaacccgcttggatgaatgacagccacaaagatcagagtaagagatggctgtctgatgaacatactggtaattcagacaactggagagaattcaaacctggacctagaattcctgttataaaccgacaaagaaaagactcctttcaagaaaatgaagatggttataggtggcaagacacaagaggctgcagaactgtaagacgactgtttcataaagacctaacaagcctagaaaccacgtcagaaatggaagcaggaagtcctgaaaacaagaagcagaggtccagacctaggaagccacggaagactagaaatgaggaaaatgagcaggatggagacttggaaggccctgtgatcgatgagtctgtactttcaacgaaggagctgctaggcttacagcaggctgaggagagactgaagagagactgcattgacaggctaaaaaggcgaccacgaaactaccctacagcaaagtacacctgcagactctgtgatgttttaattgaatccattgcatttgcccataagcatatcaaggaaaagaggcacaagaaaaacattaaggagaagcaagaggaagagttgctcactacgttacccccaccaacaccctcccagataaatgcagttggcattgccattgacaaagtggtacaggaatttggcttacacaatgagaacttggaacagaggctggaaattaaacgtatcatggaaaatgtgttccaacacaagttaccagattgttccctaagattatatgggtcatcctgtagcagattgggtttcaaaaattcggatgtaaacattgacatccagtttccagccattatgtctcagccagatgtcctcttacttgttcaagaatgtttaaagaacagtgactcctttattgatgttgatgcagacttccatgctagggtgccagtggtggtgtgcagagaaaagcaaagtggtcttctgtgtaaagtgagcgcaggaaatgaaaatgcttgtctgacaacaaagcatttaactgcccttggaaaactagaaccaaagctggttcctttggtgattgcatttaggtactgggcaaagctttgcagtatagatcgccctgaagaaggaggtctgccaccttatgtgtttgccctgatggccattttctttcttcagcagaggaaagaaccccttttgcctgtatatctaggatcatggattgaaggattctcattaagcaaactagggaatttcaaccttcaagacattgaaaaagatgttgtgatctgggaacatactgacagtgctgcaggggacacaggcataacaaaagaagaggcaccaagagaaacgccgattaaaaggggacaggtgtcattaatattggatgtgaaacaccagccttcagtaccagttgggcagctctgggtggaattgctgcggttctatgctttagaatttaatttggctgatttagtgataagtattcgtgtcaaagaattggtatctcgggaattgaaggattggcccaaaaagcgcattgccattgaagatccctactctgttaaaagaaatgtggcaagaaccctaaatagtcaacctgtgtttgaatatatacttcattgtttaaggacaacatacaagtattttgctcttccacacaaaattacaaaatccagccttctaaagcctctgaatgcaattacatgtatttcagaacattctaaagaagtaataaatcatcatccagatgtacaaacaaaagatgataagctcaaaaactcagttttggcccaaggtcctggtgctaccagttcagctgcaaatacctgtaaggtacagccacttactcttaaagagactgctgaaagttttggaagcccaccaaaagaagaaatgggaaatgaacacatcagtgtccaccctgaaaactcagactgtatccaagcagatgttaactctgatgattacaagggtgataaagtataccatccagaaacaggaaggaaaaacgagaaagagaaagttggaaggaagggcaagcatctgttgactgttgatcagaaacgtggagagcatgttgtctgtggcagcacacgtaataatgagtcagagagcactttggatttagaaggcttccaaaatcccacagctaaagagtgtgagggacttgccactttagataacaaggctgatcttgatggagaaagtacagaaggtactgaggaactagaagactctctaaaccactttacccactcagtacagggccagacatcagaaatgattccctctgatgaagaggaggaggacgacgaagaagaggaggaggaagaagaacctaggctcaccattaaccaaagggaagatgaagatggcatggctaatgaagatgagttagacaacacctacactgggtcaggggatgaggacgccctatctgaagaggatgatgagttaggcgaagctgctaagtatgaagacgtgaaagaatgtggaaaacatgtagaaagagctctcctagtggaacttaataaaataagtctcaaggaagaaaatgtatgtgaagaaaaaaattcacctgtggatcagtctgattttttttatgaattcagtaaacttatcttcaccaaaggcaagtctcctacggtagtgtgcagcttatgcaaacgagagggtcatctaaagaaggactgtcctgaagacttcaaaagaatccagctagaacctctgccaccattaacacccaagtttttaaatatcttagatcaagtctgtatccagtgttataaggatttttctccaacaattatagaagatcaggctcgtgaacatattcggcaaaacctagaaagtttcataagacaggactttccaggaactaaattgagcctgtttggctcctccaaaaatggatttgggttcaaacagagtgaccttgacgtctgtatgacaattaatggacttgaaactgctgagggattggactgtgtcagaactattgaagaattagcaagagtcctcagaaaacattcaggtctgagaaacatcttacctattacaacagcaaaggtgccaattgtgaagttcttccatttgagaagtggtctggaagtagatatcagtttgtataacacattggcccttcataacacaaggcttttatctgcttattccgccattgatcccagagtgaagtatttgtgctataccatgaaagtatttacaaagatgtgtgatattggtgatgcatctagaggcagcttatcatcgtatgcatatactcttatggtgctatattttctccagcagaggaatccaccagtcattcctgtccttcaagagatatacaaaggtgaaaagaaacctgaaatatttgttgatggctggaatatttatttttttgatcaaatagatgaactgcctacctattggtcagaatgtggaaaaaatacagaatctgttgggcagttatggttgggccttcttcgtttctacacagaggaatttgattttaaagaacatgttattagcatcaggagaaaaagtctgcttacaacttttaagaaacagtggacctcaaaatacattgttattgaagatccctttgatttgaatcataatcttggagctggattatcaaggaaaatgacaaattttataatgaaggcttttatcaatggtagaagagtatttggtattcctgtcaagggatttccaaaggactacccctcaaaaatggaatacttttttgatccagatgtgttaactgaaggagagctggccccaaatgatagatgttgtcgaatttgtggaaaaatcggacacttcatgaaggactgtcctatgaggagaaaagtaagacggcggcgagatcaggaagatgccctgaaccaaagataccctgagaacaaggaaaaaagaagcaaagaggacaaagaaattcacaacaagtacacagaaagggaggtgtcaacaaaagaagataagcccatacagtgcacacctcagaaagccaagccaatgcgggcagctgctgacctggggagggagaagatcctcaggccaccagtagaaaaatggaagagacaggatgacaaagacttaagagaaaaacgttgttttatttgtggaagagaagggcacattaaaaaggaatgcccacagtttaaaggctcttcaggtagcctttccagtaaatatatgactcagggaaaagcctcagcgaagaggacccagcaggaatcatgagggaaggaaaatgcagcactctaaatggccactcaggcgttcctattcactcggaaaattaggttcatttcacaggacacagcagtgtagatcaggcttcaacttaacatttaagggaaatgtcagatttttttttaatttaatgaaattgttaatgaggaaaaatttttaatatagtcttatctaccacacatccccatagatttaaggattttaatagaaagacatgatgtatgtatttaagccacgttaaaagaaaaaatataactatggaccggtattcagtgaatacagtttcatggtttttaattctttcaaagcacattaaaaatggtgtgctgataaaccccaagtaaattaaccctttttccgtataaatccattttttgttttgaagaggggaaattatatttattgttgtttactgaatcctggtgtgaaagcatatcagatatgtatgaactgctactgctgtacttccgatttacggacatcattttattgctatttgtagacgtgataacatgaacatgagtacctatttatgtgggccttcagtggatgggcagtgccactcaggtctctggggtttccctctctaattttaagtaaattgacatataactactatgcttataaaaatgaagtaaggaaaacaagtagtcctgtttgccactaaaaacattttcaaaggaaaaataaaatgaaagtactttttactttttatgatactcagaaattaggatgaagaacttttaaaattgctgaagatcaaagaggttatctctgccagtcacaagtgtggctggtgtcattctgggtctgactggagccctcctggactgtttctttaatttcaaaagccctgcagacatagtacctggtcagaactatgcctcggtttatttatcattttgaaataaaatcagaatttcaacctgtaaaaaaaaaaaaaaaaaa

SEQ ID NO: 309 - DNA, 2578 bp, Artificial Sequence
  RPH3AL
attgacttaagtcccagtgattcagctcctcatctggaacacctcgggtcacccccgacaacggtggtgggagggagagcggcctcctcctccctggtggggcctgtctgggtgaagcccctctgttcccgatgtgactccccacccccagccgggtgctccgagccatggccgacaccatcttcggcagcgggaatgatcagtgggtttgccccaatgaccggcagcttgcccttcgagccaagctgcagacgggctggtccgtgcacacctaccagacggagaagcagaggaggaagcagcacctcagcccggcggaggtggaggccatcctgcaggtcatccagagggcagagcggctcgacgtcctggagcagcagagaatcgggcggctggtggagcggctggagaccatgaggcggaatgtgatggggaacggcctgtcccagtgtctgctctgcggggaggtgctgggcttcctgggcagctcgtcggtgttctgcaaagactgcaggaagaaagtctgcaccaaatgtgggatcgaggcctcccctggccagaagcggcccctgtggctgtgtaagatctgcagtgagcaaagagaggtctggaagaggtcgggggcctggttctacaaagggctccccaagtatatcttgcccctgaagacccctggccgagctgatgacccccacttccgacctttgcccacggaaccggcagagcgagagcccagaagctctgagaccagccgcatctacacgtgggcccgaggaagagtggtttccagtgacagtgacagtgactcggatcttagctcctccagcctagaggacagactcccatccactggggtcagggaccggaaaggcgacaaaccctggaaggagtcaggtggcagcgtggaggcccccaggatggggttcacccacccgccgggccacctctctgggtgccagagcagcctggccagtggtgagacggggacaggctctgctgacccgccagggggaccccgccccgggctgacccgaagggccccggtaaaagacacacctggacgagcccccgctgctgacgcagctccagcaggcccctccagctgcctgggctgaggtgtctggtgcctggaacagacttccctgtggaggattcctgccagaccctgcccggctcctccctgaccggtccttgtgccctcaccagacaccctgttggccatgactcaacaaaccagtgttgggagccgtctgcctccccagctcagtgcctttctgcaccccttctctcctggggagctgtctgcatccgccaccccctccaaccactgccctcagcccccgaccttatttattaccctcccctcccacacccccaatctacctggtgatgattttaagtttgcgcgtgtcttgggttgggctggggggtttcccacatgcagtgtcagaggggccgcccggtggggctatctccgttgctatattaatggcaagactaaatgaaacctagggcacggcctccgaagctgcgtgtggccccttagaggtgagcatcagagccagagcagtgagggggagactcacccaccctctccctctcccttcagctctgggaggcaggcgcagtgcccccctcccatgggctggcccaggaccgtgggtgaaacctgggtctgtttagtttctttggtttttgtatgtttgtttgtttttgacacagtctcgctttgttgcccaggctggggtgcagtggcacgatcgcggctcactgcaacctccacctcccgggctcaagcgattctctcacctcagcctcctgagtaggtgggattacagatgcccgccaccacacccagttaatttttgtatttttagaagagatggggtttctccatgttggccaggctggtcttgaactcctggtctcaagtgatctgcccgcctcggcctcccaaagtgctgggattacaggtgtgagccaccgcacccaatcctattaggtttctttgaatcccctcatggcctgcctggtttttgctcagcctgtcttcagcttgaggagctgggaagctctggtggatgctatgaactcacttgctgaagagcagcgttcaggtgcatccccagccagggcacgtggctccctcagccatgaattcacttctcttcaggaggtttggcttggcatgaaaatacttcattcagagtatgggcaaatgcttctggaaaacccttccctgaagagagagaacgtgtgtgtgtgtgtcggtgatcacaccctcccatccttcctgcctcctgccccaaaccccgggttcctgggtctggaagggccttctctccaagctgggagctcctgggcccccaccattcactttttgtccttgctgctggcaaacagtaaagaaactcactttccctgtggcacgttatgcttcagaattaaaacaatgaagattaaaatttgcaccgagccagtgtgttgatcgaagaccacgattgcctgtgtttctgagatgcgtccatggaaaaatggaaaaaactgtggtgcgttgacttgctggaacccttcctaa

SEQ ID NO: 310 - DNA, 3106 bp, Artificial Sequence
  NCOR1
gtggtttcctagaaacatgattgtttattggcattgatctcacagtctggtgaggacttctttactgataatgtcaagttcaggttatcctcccaaccaaggagcattcagcacagaacaaagtcgttatcctcctcactctgtccagtatacatttcccaacacccgccaccagcaggatccagcattcggaggcaaacatgaagctccatcctctccaatttcggggcaaccatgtggagatgatcaaaatgcttcaccttcaaaactctcaaaggaagagttaatacagagtatggatcgtgtagatcgagaaattgcaaaagtagaacagcagatccttaaactgaaaaagaaacaacaacagcttgaagaagaggcagctaaacctcctgagcctgagaagcccgtgtcccctcctcctgtggagcagaaacaccgcagtattgtccaaattatttatgatgagaatcggaaaaaagcagaagaagctcataaaatttttgaaggtcttggcccaaaagttgaactgccactgtataaccagccatcagataccaaggtgtaccatgagaacatcaagacaaaccaggtgatgaggaaaaaactcattttattttttaaaagaagaaatcatgcaagaaaacaaagggaacaaaaaatctgccagcgttatgatcagctcatggaggcatgggagaaaaaagtggacagaatagaaaataatcctcggaggaaagctaaagaaagcaaaacaagggaatactatgaaaagcagtttccagaaattcgaaaacaaagagaacagcaagaaagatttcagcgagttgggcagaggggagctggtctttcagccaccattgctaggagtgagcatgagatttctgaaattattgatgggctctctgagcaggagaataatgagaaacaaatgcggcagctctctgtgattccacctatgatgtttgatgcagaacaaagacgagtcaagttcattaacatgaatgggcttatggaggaccctatgaaagtgtataaagataggcagtttatgaatgtttggactgaccatgaaaaggagatctttaaggacaagtttatccagcatccaaaaaactttggactaattgcatcatacttggagaggaagagtgttcctgattgtgttttgtattactatttaaccaagaaaaatgagaattataaagccctcgtcagaaggaattatgggaaacgcagaggcagaaaccagcaaattgctcgaccctcgcaagaagaaaaagtagaagaaaaagaagaggataaagcagaaaaaacagaaaaaaaagaagaagaaaagaaagatgaagaggaaaaagatgaaaaagaagactccaaagaaaataccaaggaaaaggacaagatagatggtacagcagaagaaactgaggaaagagagcaagccacaccccgggggcgaaagactgccaacagtcagggccgccgtaagggccggatcaccaggtccatgacaaacgaagctgcagctgccagtgctgcagccgcagcggctactgaagagcccccaccacctctgccaccgccaccagaacccatttctacagagcctgtggagacctctcgatggacagaagaagaaatggaagttgctaaaaaaggtctagtagaacatggtcgtaactgggcagcaattgctaaaatggtgggaacgaaaagtgaagctcaatgtaaaaacttctattttaactataaaaggcgacacaatcttgacaacctcttacagcagcataaacagaaaacttcacgaaaacctcgtgaagagcgagatgtgtctcaatgtgaaagtgtcgcttccactgtttctgctcaggaggatgaagatattgaagcctccaatgaagaagaaaatccagaagacagcgaaggtgcagaaaatagttctgatacagaaagtgctccttctccttcaccagttgaagctgtcaagcccagcgaggacagtcctgaaaatgctacttctcgaggaaacacagaacctgcggttgagcttgagcccaccacggaaactgcacccagtacatctccctccttagcagttccaagtacaaaaccagctgaagatgaaagtgtggagacccaggtgaatgacagcatcagtgctgagacagcagagcagatggatgtagatcagcaggagcacagtgctgaagagggttctgtttgtgatcccccacccgctaccaaagctgactctgtggacgttgaagtgagggtgccagaaaaccatgcatctaaagttgaaggtgataataccaaagaaagagacttggatagagccagtgagaaggtggaacctagagatgaagatttggtggtagctcagcaaataaatgcccaaaggcccgagccccagtcagacaatgattccagtgccacgtgcagcgctgatgaggatgtggatggagagccagagaggcagagaatgtttcctatggactcaaagccttcactgttaaaccccactggatctatactcgtctcatctccgttaaaaccaaatccactggatctgccacagcttcagcatcgagctgctgttatcccaccaatggtatcctgcaccccatgtaacataccaattggaaccccagtgagcggctatgctctctaccagcgacacattaaagcaatgcatgagtcagcactcctggaggagcagcggcagagacaagaacagatagatttggaatgtagaagttctacaagtccatgtggcacatccaagagtccaaacagagagtgggaaggtaggtagatagagctatcaccaagagaacttttatgaagggaaataaagctaaacccaaaagcagtgtccattgtgctttgtaagttgtcagcctcccaactgattattatatttgtcctaacagacacagttccttaaattgaccttaaactatgaagaaatgttagtattattaactactaaaggatgccagtaacatttttaatagcattctagttaatgtgaattttctgatattcatctttgtgctggaagacattataaataaagttatgctttatgttccgttcaaaaaaa

SEQ ID NO: 311 - DNA, 3928 bp, Artificial Sequence
  GREM1
actcggtgcgccttccgcggaccgggcgacccagtgcacggccgccgcgtcactctcggtcccgctgaccccgcgccgagccccggcggctctggccgcggccgcactcagcgccacgcgtcgaaagcgcaggccccgaggacccgccgcactgacagtatgagccgcacagcctacacggtgggagccctgcatgtgacggagcgcaaatacctgaagcgagactggtgcaaaacccagccgcttaagcagaccatccacgaggaaggctgcaacagtcgcaccatcatcaaccgcttctgttacggccagtgcaactctttctacatccccaggcacatccggaaggaggaaggttcctttcagtcctgctccttctgcaagcccaagaaattcactaccatgatggtcacactcaactgccctgaactacagccacctaccaagaagaagagagtcacacgtgtgaagcagtgtcgttgcatatccatcgatttggattaagccaaatccaggtgcacccagcatgtcctaggaatgcagccccaggaagtcccagacctaaaacaaccagattcttacttggcttaaacctagaggccagaagaacccccagctgcctcctggcaggagcctgcttgtgcgtagttcgtgtgcatgagtgtggatgggtgcctgtgggtgtttttagacaccagagaaaacacagtctctgctagagagcactccctattttgtaaacatatctgctttaatggggatgtaccagaaacccacctcaccccggctcacatctaaaggggcggggccgtggtctggttctgactttgtgtttttgtgccctcctggggaccagaatctcctttcggaatgaatgttcatggaagaggctcctctgagggcaagagacctgttttagtgctgcattcgacatggaaaagtccttttaacctgtgcttgcatcctcctttcctcctcctcctcacaatccatctcttcttaagttgatagtgactatgtcagtctaatctcttgtttgccaaggttcctaaattaattcacttaaccatgatgcaaatgtttttcattttgtgaagaccctccagactctgggagaggctggtgtgggcaaggacaagcaggatagtggagtgagaaagggagggtggagggtgaggccaaatcaggtccagcaaaagtcagtagggacattgcagaagcttgaaaggccaataccagaacacaggctgatgcttctgagaaagtcttttcctagtatttaacagaacccaagtgaacagaggagaaatgagattgccagaaagtgattaactttggccgttgcaatctgctcaaacctaacaccaaactgaaaacataaatactgaccactcctatgttcggacccaagcaagttagctaaaccaaaccaactcctctgctttgtccctcaggtggaaaagagaggtagtttagaactctctgcataggggtgggaattaatcaaaaacctcagaggctgaaattcctaatacctttcctttatcgtggttatagtcagctcatttccattccactatttcccataatgcttctgagagccactaacttgattgataaagatcctgcctctgctgagtgtacctgacagtagtctaagatgagagagtttagggactactctgttttagcaagagatattttgggggtctttttgttttaactattgtcaggagattgggctaaagagaagacgacgagagtaaggaaataaagggaattgcctctggctagagagtagttaggtgttaatacctggtagagatgtaagggatatgacctccctttctttatgtgctcactgaggatctgaggggaccctgttaggagagcatagcatcatgatgtattagctgttcatctgctactggttggatggacataactattgtaactattcagtatttactggtaggcactgtcctctgattaaacttggcctactggcaatggctacttaggattgatctaagggccaaagtgcagggtgggtgaactttattgtactttggatttggttaacctgttttcttcaagcctgaggttttatatacaaactccctgaatactctttttgccttgtatcttctcagcctcctagccaagtcctatgtaatatggaaaacaaacactgcagacttgagattcagttgccgatcaaggctctggcattcagagaacccttgcaactcgagaagctgtttttatttcgtttttgttttgatccagtgctctcccatctaacaactaaacaggagccatttcaaggcgggagatattttaaacacccaaaatgttgggtctgattttcaaacttttaaactcactactgatgattctcacgctaggcgaatttgtccaaacacatagtgtgtgtgttttgtatacactgtatgaccccaccccaaatctttgtattgtccacattctccaacaataaagcacagagtggatttaattaagcacacaaatgctaaggcagaattttgagggtgggagagaagaaaagggaaagaagctgaaaatgtaaaaccacaccagggaggaaaaatgacattcagaaccagcaaacactgaatttctcttgttgttttaactctgccacaagaatgcaatttcgttaacggagatgacttaagttggcagcagtaatcttcttttaggagcttgtaccacagtcttgcacataagtgcagatttggctcaagtaaagagaatttcctcaacactaacttcactgggataatcagcagcgtaactaccctaaaagcatatcactagccaaagagggaaatatctgttcttcttactgtgcctatattaagactagtacaaatgtggtgtgtcttccaactttcattgaaaatgccatatctataccatattttattcgagtcactgatgatgtaatgatatattttttcattattatagtagaatatttttatggcaagatatttgtggtcttgatcatacctattaaaataatgccaaacaccaaatatgaattttatgatgtacactttgtgcttggcattaaaagaaaaaaacacacatcctggaagtctgtaagttgttttttgttactgtaggtcttcaaagttaagagtgtaagtgaaaaatctggaggagaggataatttccactgtgtggaatgtgaatagttaaatgaaaagttatggttatttaatgtaattattacttcaaatcctttggtcactgtgatttcaagcatgttttctttttctcctttatatgactttctctgagttgggcaaagaagaagctgacacaccgtatgttgttagagtcttttatctggtcaggggaaacaaaatcttgacccagctgaacatgtcttcctgagtcagtgcctgaatctttattttttaaattgaatgttccttaaaggttaacatttctaaagcaatattaagaaagactttaaatgttattttggaagacttacgatgcatgtatacaaacgaatagcagataatgatgactagttcacacataaagtccttttaaggagaaaatctaaaatgaaaagtggataaacagaacatttataagtgatcagttaatgcctaagagtgaaagtagttctattgacattcctcaagatatttaatatcaactgcattatgtattatgtctgcttaaatcatttaaaaacggcaaagaattatatagactatgaggtaccttgctgtgtaggaggatgaaaggggagttgatagtctcataaaactaatttggcttcaagtttcatgaatctgtaactagaatttaattttcaccccaataatgttctatatagcctttgctaaagagcaactaataaattaaacctattctttctgtg

SEQ ID NO: 312 - DNA, 1365 bp, Artificial Sequence
  ENO3
ataaatgcgcagcctgagagggggtgagctgacactgtcccagctgccacctagactcggagctccatccaaacctccagcgaagacatcccagccatggccatgcagaaaatctttgcccgggaaatcttggactccaggggcaaccccacggtggaggtggacctgcacacggccaagggccgattccgagcagctgtgcccagtggggcttccacgggtatctatgaggctctggaactaagagacggagacaaaggccgctacctggggaaagccaagtttggggccaatgccatcctgggcgtgtccttggccgtgtgtaaggcgggagcagctgagaagggggtccccctgtaccgccacatcgcagatctcgctgggaaccctgacctcatactcccagtgccagccttcaatgtgatcaacgggggctcccatgctggaaacaagctggccatgcaggagttcatgattctgcctgtgggagccagctccttcaaggaagccatgcgcattggcgccgaggtctaccaccacctcaagggggtcatcaaggccaagtatgggaaggatgccaccaatgtgggtgatgaaggtggcttcgcacccaacatcctggagaacaatgaggccctggagctgctgaagacggccatccaggcggctggttacccagacaaggtggtgatcggcatggatgtggcagcatctgagttctatcgcaatgggaagtacgatcttgacttcaagtcgcctgatgatcccgcacggcacatcactggggagaagctcggagagctgtataagagctttatcaagaactatcctgtggtctccatcgaagacccctttgaccaggatgactgggccacttggacctccttcctctcgggggtgaacatccagattgtgggggatgacttgacagtcaccaaccccaagaggattgcccaggccgttgagaagaaggcctgcaactgtctgctgctgaaggtcaaccagatcggctcggtgaccgaatcgatccaggcgtgcaaactggctcagtctaatggctggggggtgatggtgagccaccgctctggggagactgaggacacattcattgctgaccttgtggtggggctctgcacaggacagatcaagactggcgccccctgccgctcggagcgtctggccaaatacaaccaactcatgaggatcgaggaggctcttggggacaaggcaatctttgctggacgcaagttccgtaacccgaaggccaagtgagaagctggaggctccaggactccactggacagacccaggtcttccagacctgcttcctgaaataaacactggtgccaaccaagaaaaaaaaaa

SEQ ID NO: 313 - DNA, 5522 bp, Artificial Sequence
  MATR3
gcagcaacggaaaggcgccacgctcgtgagcggaaccagcgttccgggggcgctcagtgtgggcaggcaggaagcctggctccactaggacacacagattctctcctgagcagctgcgaactatgcgccccttctacccttaagagatgggatgggagtccaacaaacccagccattgctcagaccccagcccttctctcctctaagaagcaggttcacctctgccaccgcactcgcatttttttttttttttaaagcccggcctttcctaggcggggtcaagggccccgcccaccgaagccacgcccagtagccgccccggggcggggttcccctcggctcccggctgccctttcccctccggcctctgccggtgctgctgcgccctgcggagctccgaacacgtgcgcagaggctggctgtggcagatgcaactgcagatgccttcacctgaatgacatctacctccatcaggaccccagatgtctgacagccctgtgtgacaccaagataagtaacagttgtctgctggttctcagcttgaagaagattctgcagtccttattgatcctttttcttggcgttaccatttttgaagcaaagttaacctagctttctagtttgagctttctttttggccgtctttaaaaaaatttttttttttaatctataaaatagacaagagctagttctacaatgtccaagtcattccagcagtcatctctcagtagggactcacagggtcatgggcgtgacctgtctgcggcaggaataggccttcttgctgctgctacccagtctttaagtatgccagcatctcttggaaggatgaaccagggtactgcacgccttgctagtttaatgaatcttggaatgagttcttcattgaatcaacaaggagctcatagtgcactgtcttctgctagtacttcttcccataatttgcagtctatatttaacattggaagtagaggtccactccctttatcttctcaacaccgtggagatgcagaccaggccagtaacattttggccagctttggtctgtctgctagagacttagatgaactgagtcgttatccagaggacaagattactcctgagaatttgccccaaatccttctacagcttaaaaggaggagaactgaagaaggccctaccttgagttatggtagagatggcagatctgctacacgggagccaccatacagagtacctagggatgattgggaagaaaaaaggcactttagaagagatagttttgatgatcgtggtcctagtctcaacccagtgcttgattatgaccatggaagtcgttctcaagaatctggttattatgacagaatggattatgaagatgacagattaagagatggagaaaggtgtagggatgattctttttttggtgagacctcgcataactatcataaatttgacagtgagtatgagagaatgggacgtggtcctggccccttacaagagagatctctctttgagaaaaagagaggcgctcctccaagtagcaatattgaagacttccatggactcttaccgaagggttatccccatctgtgctctatatgtgatttgccagttcattctaataaggagtggagtcaacatatcaatggagcaagtcacagtcgtcgatgccagcttcttcttgaaatctacccagaatggaatcctgacaatgatacaggacacacaatgggtgatccattcatgttgcagcagtctacaaatccagcaccaggaattctgggacctccacctccctcatttcatcttgggggaccagcagttggaccaagaggaaatctgggtgctggaaatggaaacctgcaaggacctagacacatgcagaaaggcagagtggaaactagcagagttgttcacatcatggattttcaacgagggaaaaacttgagataccagctattacagctggtagaaccatttggagtcatttcaaatcatctgattctaaataaaattaatgaggcatttattgaaatggcaaccacagaggatgctcaggccgcagtggattattacacaaccacaccagcgttagtatttggcaagccagtgagagttcatttatcccagaagtataaaagaataaagaaacctgaaggaaagccagatcagaagtttgatcaaaagcaagagcttggacgtgtgatacatctcagcaatttgccgcattctggctattctgatagtgctgttctcaagcttgctgagccttatgggaaaataaagaattacatattgatgaggatgaaaagtcaggcttttattgagatggagacaagagaagatgcaatggcaatggttgaccattgtttgaaaaaagccctttggtttcaggggagatgtgtgaaggttgacctgtctgagaaatataaaaaactggttctgaggattccaaacagaggcattgatttactgaaaaaagataaatcccgaaaaagatcttactctccagatggcaaagaatctccaagtgataagaaatccaaaactgatggttcccagaagactgagagttcaaccgaaggtaaagaacaagaagagaagtccggtgaagatggtgagaaagacacaaaggatgaccagacagagcaggaacctaatatgcttcttgaatctgaagatgagctacttgtagatgaagaagaagcagcagcactgctagaaagtggcagttcagtgggagacgagaccgatcttgctaatttaggtgatgtggcttctgatgggaaaaaggaaccatcagataaagctgtgaaaaaagatggaagtgcttcagcagcagcaaagaaaaagcttaaaaaggtggacaagatcgaggaacttgatcaagaaaacgaagcagcgttggaaaatggaattaaaaatgaggaaaacacagaaccaggtgctgaatcttctgagaacgctgatgatcccaacaaagatacaagtgaaaacgcagatggtcaaagtgatgagaacaaggacgactatacaatcccagatgagtatagaattggaccatatcagcccaatgttcctgttggtatagactatgtgatacctaaaacagggttttactgtaagctgtgttcactcttttatacaaatgaagaagttgcaaagaatactcattgcagcagccttcctcattatcagaaattaaagaaatttctgaataaattggcagaagaacgcagacagaagaaggaaacttaagatgtgcaaggagatttaatgatttcaaagaaaataatggttctttgtttttaatgttaaccttttttaaatacaatactgatagttagaagaaaactattgtactcttttgttttagtggagaaataatagatgtctgttcatgtgttaagtgttatagcaaaaaaaatacacatatggttaagttaatgaatagtttttgttttatcagaatggcaacagacagaagtactttgtagagattgacttcctaagctacttaagacaacttgcaccactaagaaaaaaatgtagaaccatttggaaaaatgaaatttagtagttccaagtttcaaagaaatgtcaacattttattccattcaataaagaacaaaaccaatagtgtttttattactttcatctgaaacattccatgttttaatctgagccttgcagactttcatttggagtttgaacccgttttggttgcatttcatttttggagaacttaattaacgtgagattggcaattgaaatgcaggtgcagttttctgttaatgtcatgctgttgtttaggtaataagaaatattaagtaattggctttagattttgtaatttttttccctgagttcctgctagatttcgtattctagtagtcaatgtattttcagtgaaatgcaaaaatattcccgttatctttgaccagtattaatttttgagatcttactgcttgtcacttgaatcccgtgattgtcatacatctctggtataagcaacatttgatttttgaagtgtgtagaccatctcttcatattttcaagatgtaattttacatttctgcatttttaaaacagtttggccataatcctagatgcacgcttctaattcatgtacctgcacatgtgacctttgtgaacagaaatttgcatgtataatttgtgtttacttgtaactttctggttatatactgcttatatctgtggattcaagttactgaagtgaataccaataaaaagaaaaccctaggccatgttaattggttatacatgtttggaatgttaaccaacgtatttgtcagttgtggtttttattcgctcttaaactttgtgcatgctttaacaatttattacttttaaatctagagtgaattctaaagactgccgctaaagatctgagttttaaaaatgttgttgctggtggatttcttgttcctgttacataactaaaagtgaggccatttgtggtttttaaaaaccttatgaattaaaaatgctacaggtgaacaaacagaagcttatgtttagagatattgatgacttaacagtacaattggaagtaatacggatgagcaagaattagttctgcagcttttcaaaataattacgtagagactcttggtatattggattatctgttgtaaacaatttttttttcttccctgacacagggtctcactctgtcacccagactggagtgcagtggcacagttctctgcaacctcagcctttgggctcaaatgaccctcctacctcagtctcctgagtagctgggactacaggctcatgccactatacctggctagtttttggtttttttgtatagatggggctttgccatgttgcccaggttgatcttgaattcctgggcccaagtgatctgctcgcttcagcctcccaaagtgctgggactgtaggcatgagccaccatccctggccaagaaacaaagttttaatttcaaaaaaatctacaaaaacaggataggcattgtctttcaaatgttcagaccccagtttattaaaggatacttcaaatagttggctaaattttatgatctctcccgttgaaaagtaggtgatgattttaatgtgacatgcacaaaaaatccttgccagtttacttctgcaatttaattttagcctttactaattacccacttctgtttaattccaatttttaacagcaggtacataaagcattatgtgcacaatggagttcttcagtgtttcctttcagtgatggctttttcatagcttcaactttgttggatttagcaagttgaaggaaagaatgctatgtttttaatacctacatttgagagcatttagaaatcagaaattataataagctgttagtgataaatctgtaacagcccttcgattacgagaaaacctctttttagtaggaatgtttccactcatgtttgctgtaaagtttaagaacatttttcctacggctatgtcagcccttagtttaatcttacattatcctacaaaagtgaatgaaacttctagaagtaccttga

SEQ ID NO: 314 - DNA, 7592 bp, Artificial Sequence
  DCLK1
acttcattatgattcagtgcaaagtactgacagcactggggcttccggaagggagtggtgtcgggatgggggttgctgttggcaagaggcttaattgacacctttgatgtagcctaagacagaacctgcacctcccactgctgcttgggagacgtcagctttacgcagaaaaggcatctgctgatgaatcctgcatctcattcagcctgctctgggagcagccttagccatccttaaactcatccaaccgattcccatttccgcgggtgcttggcttagtgctgagacgggattccgccgttggtattcaggtccaacactaagactgtgtccatgttagaactcatagaagttaatggaacccctggtagtcagctctctactccgcgctcaggcaagtcgccaagcccatcacccaccagcccaggaagcctgcggaagcagaggagctctcagcatggcggctcctctacgtcacttgcgtccaccaaagtctgcagctcgatggatgagaacgatggccctggagaagaagtgtcggaggaaggcttccagattccagctacaataacagaacgatataaagtcggaagaacaataggagatggaaattttgctgttgtcaaggaatgtgtagaaagatcgactgctagagagtatgctctgaaaattatcaagaaaagcaaatgtcgaggcaaagagcacatgatccagaatgaagtgtctattttaagaagagtgaagcatcccaatatcgttcttctgattgaggagatggatgtgccaactgaactgtatcttgtcatggaattagtaaaggggggagacctttttgatgccattacttccactaacaaatacaccgagagagacgccagtgggatgctgtacaacctagccagcgccatcaaatacctgcatagcctgaacatcgtccaccgtgatatcaagccagagaacctgctggtgtatgagcaccaagatggcagcaaatcactgaagctgggtgactttggactggccaccattgtagacggccccctgtacacagtctgtggcaccccaacatacgtggctccagaaatcattgcagagactggatacggcctcaaggtggacatctgggcagcaggtgtaatcacttatatcctgctgtgtggtttccctccattccgtggaagtggtgatgaccaggaggtgctttttgatcagattttgatggggcaggtggactttccttctccatactgggataatgtttccgattctgcaaaggagctcattaccatgatgctgttggtcgatgtagatcagcgattttctgctgttcaagtacttgagcatccctgggttaatgatgatggcctcccagaaaatgaacatcagctgtcagtagctggaaagataaagaagcatttcaacacaggccccaagccgaatagcacagcagctggagtttctgtcatagcactggaccacgggtttaccatcaagagatcagggtctttggactactaccagcaaccaggaatgtattggataagaccaccgctcttgataaggagaggcaggttttccgacgaagacgcaaccaggatgtgaggagccggtacaaggcgcagccagctcctcccgaactcaactcggaatcggaagactactccccaagctcctccgagactgttcgctcccctaactcgcccttttaataagacccttttactcaaagtcctagcttaaccctttgagactctgagatttttttcccccaaatttgtgtaaaacagtttcatctgatctatctagcgctcaatgcttgaatggcagaactgaaagtgttttcaggtatctttgtagcggtttccctttactgaataagatgacacgtggtgattgtgaagatggtaatttgctgctaatagagtcctcaaagggttaaggccaatttgcaatttttttttaaacttagaagcaatgaatgttttcatcagtcaagctaggatctgcagtatgtaatatagcacttgttaaccctctgagtgcatagaattttattgagaattcttgtttgggaatttttcaggcctttggatgtatacacacatgtttcttgattttactgcagatcaaggggtgttgttagatgctgaaatgtccagaaaagaaggacatttagaatgatatcttgtttgtccttttctgtgggtttagaacgtggcaggtttataacttcgacacacgcacggttctttcttcttcacaatcctattcagaaacagattttttttttcattagagatatgactgtcagttgcagtgagttctgcatcccaagtggagggaattgggtttgtggcaaagagcttgacccaggaaatagatggtgccccccaaattgtctccacatgaagatgtactgatgacgccccagaaatgctgcttccatatcagctgctgctagcgccagcgcagactctcagggagtcaccacagcttgtcttgtgcttggtgagtgagggtctctctactcagtgtcagacatctacaggaaagaaacaactggtggaaaagagcaataaattgcccggtgctctgcagggctggaatttcaaacagaaagagggaataagatcctgtgatttttctcacctgcttttccacgcactgtggtcatcactgtgcaatctacatctagtatgaaatccacacataggagagctggggcacaaggggactggaggcagttgctttgcaagatggctgaggagaaagcacactgggaacacaatccagaatgttctaacaataagttttcagtgaataaaccactggcaagacaattccatgtgcacctttaggttacctatatagtctcctaggaagatcaggatgaaagacctagatgatacccctgaggataaaacctccatcccctaaaatgattttttttaaataccactgtctttagctgtccaggaggtcagagtgttttttctgtctttgggccaagtcctgtctgagacctgtattttcactcttgttaccaaatctatctccctagtgcagtgtctccaggcctgagtttcttctggaacagattccattttagaatggggattcacaggttctgtgcatcaccacagtgctcagagaggattctcctggggtgtcttagaggcaggtgcccaactcaaatgtattcccaaggtttgctgggctctgggatccacgagacaaccagagagggatatctcatgaaatttgcatctggtggctgaacagtacctatgttctctgttttgaatatactttaatacctgagagtcttaaaatttgtgaacaacgtttctatagtcctttattttcaaatgcacattgatcttcacttgctgcatttttactcttcaaccctgaaactatggtctacattaatatggatttttaaatcacatgtcattacttttgcaacaccatcaccaaaattttttgctcttttacatttaggttcatctctgtggtctgtgttgtcctgacatgtaaaaagcatatcgtttattgaggtttttttcccccccttttagagcatccggaagtgataacacgcaaaatcacaaagtagcataaatcagtaaattagttgagttgtttttgggggggaggtgggggtagggggcacagaacaccagaaagagtgttggtgtgtaggtagattccatattaatgaggaacactgaactagttggaaattactgctttctctagaaatataaagcaaagcactattccaaggctatggagtagctctacagcctggcctcaactctaaaagtgtgaagaatgcaatgggcagagacctacctgcagtggactgtcattttcctttctttctctgaattactgctttttctgtgggcattaactatattgctacagcatctagtgtactgagcctgcggtgcatggctcaggccttttcccatcgacgtctagggggactctggaccgtgtgaagctagggggtgtttctcagcacactgcagaagggcagctcagaagaatgcagggcccattcagcatggggatcccagcacatcactgtagaatttgagtgatctatgctgaataaacagtggaatgtgaccagtcaagtagaaatcttgagtaatcagatggaatgcaatctttctaacattaagctaccaagatcctgaatgtcagagatgtactcagagggttaacagacaagcacaaggcatgctgactacattggtgtatccagattgctttgcttttagccagtgctttctaatttttttctcgacattcttgggatagttcaagtttgaaataattaagtggtggtgttctttaaggaatttctataaccaaattgatcttatttttgatttcacttatcatagaacaaatatgtatcattatggcagtgtatctatgtaattatcaatttaatcatcaccaccggtgtttccatattttttcccaagtatttaatatagctctcttatggtggtggcctggtgatggggaccgtctttcttttactgacacatgaccaatcatatggtattttcaagggaattttaagattcatcttttcagtttgatagtagactagttaaggaagaactctttcattacttgcatcgtgtaaatcatctctgtagacatgtgttcatattaatgaacacattttttctcaacattgtagcagaaatcattttattcgtcatgatcaatgaatatgtgatttgctccagatcgttagaaggaaaagtaagatttcagtcatcaaaaatgtttttaccgtagccctcatctaacttacacgtggtgcatattaaaataagcagagaaaaaaaaatgtgaataaactactgaaaacacttggtgttttgtgttcaatgagaccttcctgcaacctgctccccatgggtggcagttaacaggcccatcagatattgttgaaagaaagcaatatatccatgaatgaaggctaaaattgcaatcctttaccctttgaggcatatttcagttgaaaacaaaaagaaaagaaaatttggcttagagggtcacagagctcccatatgaccaagtctcaagcacattaaatcatggttgtttactggccaagggcgtccactagacaactctatcccttgcgctgaagctcaatcgtgctgagggagagctttcttaatattactgtgttgctcttagcccttctctgggttaggatctgtcagcatttctatgataaactcctattctcaaaggtttttaatttgaccataaaaatgtgccccaggctgaagtttgctatacagggctgtaccaaagagtgaaggtttacttccttctctttccaacttcttccccattctccaaggaaaagaacaacaaaaaaatctggtatggtccctccttaatagtgatttcagaattttggaaagcaccaagatccaagatggtagttttaatgtagttactcattcgcacacattttttaaatttaatgggtcacctggcatatattgtagataacatatcttttctataatttgtaagtcaataatttttttaactgctacatgatatttttttttgcccaaagattttaaaagacttgaagttggtcagttcaaaactcagatttttctacacattgtctgccatgtccattaggagtttggggaaaatactctcacacagacccttactttgcatgcagtttagagggtaagatacgtgcttcttttggggataaagatttccttacttaattgtcaaatttcatggagccattctagtctgttggggaaaatagtgattaaaagcacttccaaaattaacattttttgacaattcagatatgaaaagaagcaggggaaaataatacactttactcttttcttgcttaaaggcaaacaaatcaatgaaacttgaggacacactaaacatttgataactgcaaatgtgctttaaaaattggttcaatggtgcttacacatgaaacggtaacaaatggggttcctaggacgtcagaaggaatctttagtttgtatgtaattacacactagaggaggaggtgcttttaagccagtcttttatttttaatcatctcaaatatgcaaccatacatgcagtaacattaagggtcgtaaactggtgggaaacaggaacttcagtggagaggcttaaatgcctctggttagagtgggggtttttgtttgtttgtttattgttgggtttcaacactgagcatcatttctgtgatcaagtttctaactggcatgtgttttgatcatgaggtttaccatatcttgcccatacagacaaatgagagatctagtttcattttgttccctaaagaaagaacactctctaaaattaaatcatacctgtaaatttcttcagcatttgtttctgttcaatgaaattgagacccttaatgttgctttaatgtaaaattgaatattttgtctgtgatatactttaataatttaaagtaagtaatagttctaaagtcttcactgttgctactaagagaaaatagaattttaaaggtgatgataaagatgctataatgtcagttcactccagtccaatcaaatgtagtaagaaaaagtccttgaatagttctctagggacaatttctcacttgccattgacattaatctttggtgtattctcagaaaaaataaaaagaaattgaaactggtccaaggttatagtcatatcctcgataacttttgaaaaaaaattttattaggaaattaatactagcctttttcattctggctgaaagaaaattattaaaggattagttgagtgtgaaattcaacagtattttgctcatacatactaaaaaggtgcgtagggacttggcgcatttaaacaagtttctgaaaggtttcaatttgactcaagaaaaaaattcaatatttcttttgaaaatactgaatttatcacttgctgcatggatcagatggcataggttaatctttgattttcagaatcctaatgaaataactttcaaacaatttgtgtccttaattaaaggtggaatgagatccaatttttccccctaatccttcagtttaagctgatacatgtaggttaatgtggaatgaaatcatctgtgatatattatgttcatttatcaactgagcttttttgatgttgcctgtttttatgtaaaacatgttcttaaagttaataaaataatagtacttggtgtatgaactactacataataccttagctgaagggtacgctcctcagttcatttgccatattggagtaaaatttcaccttagttcaattcacaattgacacattcagttcacgaaggaatagcccagctgtgttcttagggggaattctctctatgcaaggctttaaaaattagtcatgcggtcagagtgtagctttcccacatgtcctccatagcacagtgtgtatttcatgagcataattcaaaaacagctatttcaaaaatgtcccttgtcatatattacgttcctgcctgggccactgacttggataaatacaaataaaccaaataccattca

SEQ ID NO: 315 - DNA, 441 bp, Artificial Sequence
  LOC100505841
atctttccttggtgccaaccatgcctgcatatcagggcagcattctatgatcccatggctctcacatcgacagaccacaacactaagccaacaatgatacggcgtccaccagcagttgtttgctacatttgtggtcgtgaatatggaacaaaatctattagcattcatgagccacaatgtctgaaaaaatggcataatgaaaacaacttgttgcctaaagagttaaggagaccagtacctaaaaaaccagaagtcaggaccattactgccaaaggcttctatgatcttgatgctttaaatgaagctgcttggacaagtgcccacagccagttggttccctgtaatgtttgtgggcgtaccttcctgccagacagactgattgttcaccaacgatcttgtaaacccaaagccgccaagtaaagcccttttctctctactgaa

SEQ ID NO: 316 - DNA, 743 bp, Artificial Sequence
  CAMTA1
gacgctcctcccggagagtagtgagacccctggtgcggggcgattggcggcgggagcgatgagtggcagccgcacggcccaacgggagctgtgcgtgggccgcggggcggggccagggcgggtgcgcggcggcggcggggtggctgggccggcggcggcggcggtacgaggcgcgcgctcggggtcccggtcgcgaggaggaggaggatgtggcgcgcggaggggaaatggctgccgaaaacaagccggaagagcgtttcccaaagtgtattctgcggaactagcacctactgtgttctcaacaccgtgccacctatagaagatgatcatgggaacagcaatagtagtcatgtaaaaatctttttaccgaaaaagctgcttgaatgtctgccgaaatgttcaagtttaccaaaagagaggcaccgctggaacactaatgagagatcatgatgcagccgtccttttggatttctttttaataatgtgtgacccttcacctttgatcccctgacctgcattaccttggtaaccatttcattttttaatttaatttcattttttaattttggtgtacaagctgtaacatttcatctttcaaagtgtaacacgctgatttcctcaaatagagatacccctttgagtgataaatttgcaaaatgctgtcttcattttctgtattaaaattcatttcagttttaaaataaagtgtaatctgtgttttcatccttttaaaaaaaaaaaaa

SEQ ID NO: 317 - DNA, 7769 bp, Artificial Sequence
  RUNX1T1
ccctcctgcctgtccctttctgtcttctctctctctctcccacttttcctccctctcccgctccgtctcacacgcaccctctgtttattttcctgcctccatctgggccctgctgatattgtaatcaccctgatgcacgttggcttctctcctctccctcctgcgctcacacactcactcacacacaatgtgccatcctgacaaggcttttacttctgataagctccaatgtgtgtttaatgaatacaaagccgcggtctgggtgccgcctcggccgcggccgctctcccgcgctcctttgccagaagctggcggagagaatttacatttaaagattagcagagtgagaaagagaaatctgccttttgttgtgtggggtgaggaggaggcatctacccctggccttgacgctatctcccatcacctctgctatccagacaggactcaccgagtatcaaatgataagaactgagcacactggatgaaataatacttgcactgggagcactaagaaaagattgatctctgggctggtgaacataatctctgtcccagtcagaaaaggagagaggaaattagcagagcgattggtggagaatgatatctgtcaaaagaaacacttggagagcactgagtttagtaataggtgactgccggaaaaaagggaactttgaatattgtcaagaacaggaggcatgagcccggaacgcgcttgcttttaggagacagccactttctgtgtggtacgctggattcaaggatgcctgatcgtactgagaagcactccacaatgccagactcacctgtggatgtgaagacgcaatctaggctgactcctccaacaatgccacctcccccaactactcaaggagctccaagaaccagttcatttacaccgacaacgttaactaatggcacgagccattctcctacagccttgaatggcgccccctcaccacccaatggcttcagcaatgggccttcctcttcttcctcctcctctctggctaatcaacagctgcccccagcctgtggtgccaggcaactcagcaagctgaaaaggttccttactaccctgcagcagtttggcaatgacatttcacccgagataggagaaagagttcgcaccctcgttctgggactagtgaactccactttgacaattgaagaatttcattccaaactgcaagaagctactaacttcccactgagaccttttgtcatcccatttttgaaggccaacttgcccctgctgcagcgtgagctcctccactgcgcaagactggccaaacagaaccctgcccagtacctcgcccagcatgaacagctgcttctggatgccagcaccacctcacctgttgactcctcagagctgcttctcgatgtgaacgaaaacgggaagaggcgaactccagacagaaccaaagaaaatggctttgacagagagcctttgcactcagaacatccaagcaagcgaccatgcactattagcccaggccagcggtacagtccaaataacggcttatcctaccagcccaatggcctgcctcaccctaccccacctccacctcagcattaccgtttggatgatatggccattgcccaccactacagggactcctatcgacaccccagccacagggacctcagggacagaaacagacctatggggttgcatggcacacgtcaagaagaaatgattgatcacagactaacagacagagaatgggcagaagagtggaaacatcttgaccatctgttaaactgcataatggacatggtagaaaaaacaaggcgatctctcaccgtactaaggcggtgtcaagaagcagaccgggaagaattgaattactggatccggcggtacagtgacgccgaggacttaaaaaaaggtggcggcagtagcagcagccactctaggcagcagagtcccgtcaacccagacccagttgcactagacgcgcatcgggaattccttcacaggcctgcgtctggatacgtgccagaggagatctggaagaaagctgaggaggccgtcaatgaggtgaagcgccaggcgatgacggagctgcagaaggccgtgtctgaggcggagcggaaagcccacgacatgatcacaacagagagggccaagatggagcgcacggtcgccgaggccaaacggcaggcggcggaggacgcactggcagttatcaatcagcaggaggattcaagcgagagttgctggaattgtggccgtaaagcgagtgaaacctgcagtggctgtaacacagcccgatactgtggctcattttgccagcacaaagactgggagaagcaccatcacatctgtggacagaccctgcaggcccagcagcagggagacacacctgcagtcagctcctctgtcacgcccaacagcggggctgggagcccgatggacacaccaccagcagccactccgaggtcaaccaccccgggaaccccttccaccatagagacaacccctcgctagacgtgaactcagaactgtcggaggaaagacaacacaaccaacgcgaaaccaattcctcatcctcagatgctcaaagttgttttttttgtttgtttgtttattagatgaattatcctatttcagtacttcagcaagagagaacctaactgtatcttgaggtggtagtaaaacacagagggccagtaacgggtcgtaatgacttattgtggataacaaagatatcttttctttagagaactgaaaagagagcagagaatataacatgaaatgatagatttgacctcctccctgttattttcaagtagctgggattttaaactagatgacctcattaaccgatgctttaccaaacagcaaaccaagagattgctaattgctgttgaaagcaaaaatgctaatattaaaagtcacaatgttctttatatacaataatggaaaaaaaaaaaagaggaaaaccctcaagggcatgagcattggatacagcagtagacattttaacaagaagatgaatggcgtccgtgggttgctaactgaactttgaagacccgctacaaaacgcgcagatgtgcagcagattggaaggagacacagatgttcggtttttttcctgtttctgaaaagaaataataatatccaggtcaacagaatgaaaaatgaaagatgatttgcaatgggatgtatgaatacagcagcaagaaaaaaaaatgccataatacaaaaggctccatatatatatatatatatatatatatacacacacacacacgcacatatacacacacacacacacacacacacacacacacacacacacacacacacacacacaagtaagagactcagcctgcagttaattagcattctggcagttttgacatcagccagctgccctaaataacccttcaacgtttcttcacttttgcaaggttccacagagtaagacattgggtctattccagctcattcattttatattgaaaaaaataattttaaaaatggtggcttcagctccagcccctttccaaaatttttcaaccccaccctgtttggatttttaattaaaaactagtagttctcttggtgttaaaacacttctgtcctgtgaggtttcccaatggtgtttttcttgtaaatgtgttggacaaatgtgaagatgcattgtagtttaaccatatgcccacatttagtctctttattcctagttggtgagaaacctgtatctttctatgctgcttttatatctgtatgtattagtgatatttctctagtagttaaaaaaaaaaaaaggaaaaaaagactctttttggttgtcctcaagaaaagaaaagaagaaaagctatctttcggagctgctatttcactctcttataggatttttttttttcctgaaaaccagcatgcttcacggaatgctaacatattggtgtttttgtaagagggatgtacataaatgtattttgcactgtcacaatgactccctaggcatgctttttgtttttttttttttttttttgagcaaattctttttaaatatgctagagccatttcatcaagtttagctgtagcatagagtagtcgtggaatttttcttttttttttttttaaatcattattagggacttttttaaaaaaataaaataacaagatatcctactttaaaaaaaaaggacagtgcatgcatattgctgtaaggtcgtttaagtatttctaattttacaaaagtaaaaatcattagagctccaaatgctgaggtgtagattgacagctttaacactgctgaatgccaggttatacagtattcttacaaaaagggaagtcagccaaagactgatctgatggaccaaaatcggaattttgaaaagcaccagtactactttccaaatgatcagcaggttaaacatgttcagcaaggtatagtatgaatccattaacccttcgttgtccagggtccagaccagaactacttgttagttttgaaaacagtagcccaggatgtggttgtgtgctttaggaaagtcagcagtgctgcaggctgtgtagacaaccaaagtttacaaggctgggaagacacttctccaaatacatatacaccaggcatttctttaaaatcaaaaacaatccattagctttggggcggggggtggggggagggttaaatgtaggccttggaaacagttttaagtggcttttaagtatctgcatagaggcaatcctaaggtttgctttaagtctcttaaatctaacatttttaaaagcatttcttccctgtattttcatatacaagttggttttaattttgtttgggtggtgttattttttttaaatgactttttagtttagaaagttctgatgagcaaataaatacatctatctacatgttggaagtccatctgccagcacacctgcttaaagtgaaatgaaagcacataaccaggctctgaatgggttatattttatcatggtgctcccagaatcctttgacctcactctgctttctagtctgcttgtgacactggacagtcctttcttacagagctattatatgttctaggctacgaagggttaaataatcccaaaaatgaggtatgtcatacccacacgtctttatctctagaagctgtgatgtatgtgaaacagcactgttattcttaacactagtgtgtaaaataaggattagtacagtacgtctcattactttttaattcagggcaccctgagtgaaaacaaatacaaaaaaaaatccctaactctgagctctatctctgattcctcttcctccttcccctcttcctcctcttcctctcctcctgttttgctacattctcctcagtggcaaaaagtttcactctacctctgacagcatgtatattgcaccagtagctaacaaaaactggtctagtcaaaccaaatgggcacaaaagaaccaggataccaaaagttaagctcatacagctgcaaaccatatcacttcttggtaacaatgcagacctcataaacctaaagaagagaaagaaaagaaaacttttgttactttccttttttgcttgtcacttatatacaggctatgtgagaatataatttgtaggtataacacattaagaaaaagttatcttcattggatagaattgaatggtggtcgctgataggaatagggcgtcctctagctcttatctctgtctcttactcttttctctttctctttttctctgtcatgagactgtgtgtgacagggccacctgtcttttttttttcttaaattttttttttttttatgtgtaggtgcatgtcttggggatttaaaaatttcaaggctggtttacttatgcaaagcatgcctacgtctggaatacttagggaaagaaagcgactccatgttgtccgaattcctcaagggacagaaaaaaaattggagactgttgaaatgcagatttgaagtaatttttttaaaatattattttgggttctgcgacattgtgaaaaattaaagttgttgtgcaatacttaattcagacatgtaccacaagttaatggtagactaacactggggggtggggtctaggcatcatgcttttgtcagcatactcttgagcttttaagtctactatgtctgaactgtggtttcttgtttatccttttttccttagttggactgtaatgtatggtctgtcaacctgtgaatctttaaagtatgattcaggtattgttgtattctttactgtgtaataaaaaagttgaaaaaaatctggatcctctgtctccctcgtccccggtgtgccatggttgcccaccagtgaccccagcctgaggagtccatcctccatggtgctgaatcaaatctgtagagtttattcagctacaaagcgtggctctgtaacaggagttggcttatccatgcgtgttgagtagggaatgatgtcagaactttgcaaaagtcgagctcattcataaggggatgtttctcaggcaggaggagtaggaagagtgggaggagaattactaccttccataggaaaggagagcttggcttgcctagattagctgctgcatagatagcagaggcccttttggctgtgttttgataaaattagaaatgagtacctaaatctggatcactctgctcagagaggttcgtgccaacctcatgaggctctgactcttgtcaggttgcttggctgccttgtgcatacccgaatggcagatcagctgacatgacatggaactgctctatctgccttgtcccctctcctctaattaaaagtcgctaccattgtcactcttggttatgtagttaatatccactgtggctatctccaacttgctgggacatccagttatctcctctgacacatattttttcattctctagttacaaagtttgttagagtttgaaaaacaaacccttctcccctaccctgtgaatgctgttagtttttatgtgtagttttcaaaacacagattatcttatatactgtgttgtagcagaaattcctgtttcctctgaatgttctgactttatagaccaaaataatcgttgcaaaaaatcaaggatggcacagcaggtgcatgagcccgtgtctggagaaaggttatgaaggtgaatgctggttacatgggagggtgacttggagccctctagtttccttcttgtgccagctgggttcctgtttcaaggccaggcttctctaacttgtcttcctgggaaatgtagcttttccaagaatttggtagtgcacaccaggaaaaactaggtatcagaacagatttttttttaaatagtggaaacaccctcactcccacactttggacagttagggttggatatttaatttcatagttactctttttttccacagaagaaaggccagcctgacccaagttgcctatttttaatgtgttactgcatcttattttctcttcaaagtgaaaaaggccagaaactagcagatagaaatggaacccgttgacttagttcccttataagaagttcttgcaaacacctctgtgacgttttcattcaagtggatatgttggacaaataggaaacagttttagtttacgcgaacagtatgagacttccaggtggtggacgccatttttttagaagtgttgatgatgtatttgataacattataaaagtatgtgtctcccgtgaaagaacattgagctatttccctggaatggatggggaagaaatgagcaaaggagtgctgttctgtatgggtgtctatacccttattccaaggtgaataaataaagttgtgtttgcctaatcatg

SEQ ID NO: 318 - DNA, 1708 bp, Artificial Sequence
  SEPT4
acttgcactaggaagggattgggccaggtttgcccaagtccactgggcatctttagtaaatttctctttttctcctcctattggcactctctgaattccatttgctgccccctgggaatgcctggcttctactctgttatgacagatgaggagatcaagcgtttcctggaggacaccacggatgatggagaactgagcaagttcgtgaaggatttctcaggaaatgcgagctgccacccaccagaggctaagacctgggcatccaggccccaagtcccggagccaaggccccaggccccggacctctatgatgatgacctggagttcagacccccctcgcggccccagtcctctgacaaccagcagtacttctgtgccccagcccctctcagcccatctgccaggccccgcagcccatggggcaagcttgatccctatgattcctctgaggatgacaaggagtatgtgggctttgcaaccctccccaaccaagtccaccgaaagtccgtgaagaaaggctttgactttaccctcatggtggcaggagagtctggcctgggcaaatccacacttgtcaatagcctcttcctcactgatctgtaccgggaccggaaacttcttggtgctgaagagaggatcatgcaaactgtggagatcactaagcatgcagtggacatagaagagaagggtgtgaggctgcggctcaccattgtggacacaccaggttttggggatgcagtcaacaacacagagtgctggaagcctgtggcagaatacattgatcagcagtttgagcagtatttccgagacgagagtggcctgaaccgaaagaacatccaagacaacagggtgcactgctgcctgtacttcatctcacccttcggccatgggctccggccattggatgttgaattcatgaaggccctgcatcagcgggtcaacatcgtgcctatcctggctaaggcagacacactgacacctcccgaagtggaccacaagaaacgcaaaatccgggaggagattgagcattttggaatcaagatctatcaattcccagactgtgactctgatgaggatgaggacttcaaattgcaggaccaagccctaaaggaaagcatcccatttgcagtaattggcagcaacactgtagtagaggccagagggcggcgagttcggggtcgactctacccctggggcatcgtggaagtggaaaacccagggcactgcgactttgtgaagctgaggacaatgctggtacgtacccacatgcaggacctgaaggatgtgacacgggagacacattatgagaactaccgggcacagtgcatccagagcatgacccgcctggtggtgaaggaacggaatcgcaacaaactgactcgggaaagtggtaccgacttccccatccctgctgtcccaccagggacagatccagaaactgagaagcttatccgagagaaagatgaggagctgcggcggatgcaggagatgctacacaaaatacaaaaacagatgaaggagaactattaactggctttcagccctggatatttaaatctcctcctcttcttcctgtccatgccggcccctcccagcaccagctctgctcaggccccttcagctactgccacttcgccttacatccctgctgactgcccagagactcagaggaaataaagtttaataaatctgtaggtggcttctggaa

SEQ ID NO: 319 - DNA, 1357 bp, Artificial Sequence
  LIPF
atctgaccattgttgaaggttttgtatataagaagtcaatacaacattgaccaaaatactaaccagccagagaaacagaatcctaactatttctgaggaaactgcaggtccaaaatgtggctgcttttaacaatggcaagtttgatatctgtactggggactacacatggtttgtttggaaaattacatcctggaagccctgaagtgactatgaacattagtcagatgattacttattggggatacccaaatgaagaatatgaagttgtgactgaagatggttatattcttgaagtcaatagaattccttatgggaagaaaaattcagggaatacagatgctggttatgatgtgtggctgggcaacagcagaggaaacacctgggccagaagaaacttgtactattcaccagattcagttgaattctgggctttcagctttgatgaaatggctaaatatgaccttccagccacaatcgacttcattgtaaagaaaactggacagaagcagctacactatgttggccattcccagggcaccaccattggttttattgccttttccaccaatcccagcctggctaaaagaatcaaaaccttctatgctctagctcctgttgccactgtgaagtatacaaaaagccttataaacaaacttagatttgttcctcaatccctcttcaagtttatatttggtgacaaaatattctacccacacaacttctttgatcaatttcttgctactgaagtgtgctcccgtgagatgctgaatctcctttgcagcaatgccttatttataatttgtggatttgacagtaagaactttaacacgagtcgcttggatgtgtatctatcacataatccagcaggaacttctgttcaaaacatgttccattggacccaggctgttaagtctgggaaattccaagcttatgactggggaagcccagttcagaataggatgcactatgatcagtcccaacctccctactacaatgtgacagccatgaatgtaccaattgcagtgtggaacggtggcaaggacctgttggctgacccccaagatgttggccttttgcttccaaaactccccaatcttatttaccacaaggagattcctttttacaatcacttggactttatctgggcaatggatgcccctcaagaagtttacaatgacattgtttctatgatatcagaagataaaaagtagttctggatttaaagaattatccgtttgtttttccaaaatactttattctctcatacatagtattttcataatgtttgacatgcagtgcttctttctgtaattttgactttagaaatatattggcatcaacaaacaaaaaaaaaaa

SEQ ID NO: 320 - DNA, 2434 bp, Artificial Sequence
  MSANTD3-TM EFF1
gatagctagcggccaggagaaatacagtggaaaatgcaaaacaacgaaattataaagcctgccaaatacttctcagaattggaaaagagcatcctgctggctttagtagaaaagtataaatatgtgctggaatgtaagaaaagtgatgcgcgaactattgcccttaagcagcgtacctggcaggcgctggcccacgaatacaactctcagcccagcgtgtccctgcgggatttcaaacagctgaagaagtgctgggagaacatcaaggctcggaccaaaaaaattatggcccatgaaaggagagagaaagtgaaacggagcgtcagccctctcctgagtacccacgtcctagggaaggagaagatcgccagcatgctgccggagcagctctacttcctgcagagccccccggaggaggagcccgaataccaccccgacgcctcagcccaagaattaaatgtgagggagtctgacgtaagagtttgtgatgagtcatcatgtaaatatggaggagtctgtaaagaagatggagatggtttgaaatgtgcatgccaatttcagtgccatacaaattatattcctgtctgtggatcaaatggggacacttatcaaaatgaatgctttctcagaagggctgcttgtaagcaccagaaagagataacagtaatagcaagaggaccatgctactctgataatggatctggatctggagaaggagaagaggaagggtcaggggcagaagttcacagaaaacactccaagtgtggaccctgcaaatataaagctgagtgtgatgaagatgcagaaaatgttgggtgtgtatgtaatatagattgcagtggatacagttttaatcctgtgtgtgcttctgatgggagttcctataacaatccctgttttgttcgagaagcatcttgtataaagcaagaacaaattgatataaggcatcttggtcattgcacagatacagatgacactagtttgttgggaaagaaagatgatggactacaatatcgaccagatgtgaaagatgctagtgatcaaagagaagatgtttatattggaaaccacatgccttgccctgaaaacctcaatggttactgcatccatggaaaatgtgaattcatctattctactcagaaggcttcttgtagatgtgaatctggctacactggacagcactgtgaaaagacagactttagtattctctatgtagtgccaagtaggcaaaagctcactcatgttcttattgcagcaattattggagctgtacagattgccatcatagtagcaattgtaatgtgcataacaagaaaatgccccaaaaacaatagaggacgtcgacagaagcaaaacctaggtcattttacttcagatacgtcatccagaatggtttaaactgatgacttttatatgtacactgaccatgtgatgtacatttattatgtctttttttaaagaatggaaatatttatttcagaggccttatttttggacatttttagtgtagtactgttggctcgtatttagaatattcagctacgacagttttggactgtttagtagtctttgttttatgtttttaaatacagaaattgctttcacaaatttgtaccacatggtaattctaagacttgttctttacccatggaatgtaatatttttgcaaagatggactacttcacaaatggttataaagtcatatccacttcttccacaatgaccacagcaaatgaccaagcatgaactaaaggtaaagatgtttacagattacttttcttacaaaaaaaatctagaagacactgtgtttaaatagatatttaaatgtttttgagatttagtaactgattttttagacactgcctatcgcatgaactgtaaagctgtgtgtattaggtgtaaaatatttataagatatatggactggggaatttgattattcctccctttgaaaaaatagtcctaataatttgaacaaatatgttagtaatgatggaacagatcaatgaaaagtagatatagatattgtgaaaataggctgtttaacaaacagattggaataaagcctattctaccagttaaactactttaatacacattcatttttaaagaaaatgtttgttttaacataaataaacaaatcgtatcagtgtttgtgaataaaatacaaaaatgattgttaatgattggtgctcttaaagtgagcttaaaatttatccaagacgtatatccaaatttgtcctgtagtaatagattaatattcatagattgttggtgtttaaagatctgaagtgtgagtagaatgtattcagctgtttaacatgtagtttagatattcaaaagtatgcatgtagaatttaaagaatatgttaaaaattattaattttaatattttgtttggaaaagcatgttataatataatgttttcactata

SEQ ID NO: 321 - DNA, 699 bp, Artificial Sequence
  DCTN5
agccgtagacggccgagcagtggagcgaggccgcctaaaggagagccgcgctgtcgatgagtcccagtgggccacctggagcggaagtggaggagcggccggaagtagccggaatctctgaaagactgaccgactgactctgacaggatccggggctgagggaaggaggcggcggccatggagttgggcgagctgctctacaacaagtctgagtacatcgagacggcatctgggaacaaagtcagtcgccagtcagtgttgtgtggaagccagaacatcgttctcaatggcaagaactttgtcatttctgttttcctgagcccatatatcagatgtcacagtgcctgcagggatagaaagagatcagatgagtcagtaagactgagtgtgaacaatagagagtggtggggcctggtgaattggagaatgtgaccaatctaagcccaagctggttgttactgtgtgggaatacaggcccacgtggcaacaatcagctttccagagcgtctgattctttttcaaaagcaactggaaatctcactttttaaaatgcaagatgttccactactcaaatagtaatgtttaattttaaatgatttgttaaaatgccacgtgtccttcctgtaggagatagctaaaaaaaattaaaagaaataaataataaaaatgctgcatgagccaaacaaaaaaaaaaaaaaa

SEQ ID NO: 322 - DNA, 2537 bp, Artificial Sequence
  LTF
gtccaggattctggctcagagttgcaccactgggttttatattcacttggatctttagttgttttggcgcctactgaggtctgaagtttgaatcctgcagtcaattgggatggtggcttgtaccccaaagtgccattgcaacccttgtccttcctgaggaaagggtggcagttgccctgtggaattcctgccctgctccccgtgggtgtccaggctgacagaagttgggactgtgtctggctggccgtaggaggagtgttcagtggtgcgccgtatcccaacccgaggccacaaaatgcttccaatggcaaaggaatatgagaaaagtgcgtggccctcctgtcagctgcataaagagagactcccccatccagtgtatccaggccattgcggaaaacagggccgatgctgtgacccttgatggtggtttcatatacgaggcaggcctggccccctacaaactgcgacctgtagcggcggaagtctacgggaccgaaagacagccacgaactcactattatgccgtggctgtggtgaagaagggcggcagctttcagctgaacgaactgcaaggtctgaagtcctgccacacaggccttcgcaggaccgctggatggaatgtccctatagggacacttcgtccattcttgaattggacgggtccacctgagcccattgaggcagctgtggccaggttcttctcagccagctgtgttcccggtgcagataaaggacagttccccaacctgtgtcgcctgtgtgcggggacaggggaaaacaaatgtgccttctcctcccaggaaccgtacttcagctactctggtgccttcaagtgtctgagagacggggctggagacgtggcttttatcagagagagcacagtgtttgaggacctgtcagacgaggctgaaagggacgagtatgagttactctgcccagacaacactcggaagccagtggacaagttcaaagactgccatctggcccgggtcccttctcatgccgttgtggcacgaagtgtgaatggcaaggaggatgccatctggaatcttctccgccaggcacaggaaaagtttggaaaggacaagtcaccgaaattccagctctttggctcccctagtgggcagaaagatctgctgttcaaggactctgccattgggttttcgagggtgcccccgaggatagattctgggctgtaccttggctccggctacttcactgccatccagaacttgaggaaaagtgaggaggaagtggctgcccggcgtgcgcgggtcgtgtggtgtgcggtgggcgagcaggagctgcgcaagtgtaaccagtggagtggcttgagcgaaggcagcgtgacctgctcctcggcctccaccacagaggactgcatcgccctggtgctgaaaggagaagctgatgccatgagtttggatggaggatatgtgtacactgcaggcaaatgtggtttggtgcctgtcctggcagagaactacaaatcccaacaaagcagtgaccctgatcctaactgtgtggatagacctgtggaaggatatcttgctgtggcggtggttaggagatcagacactagccttacctggaactctgtgaaaggcaagaagtcctgccacaccgccgtggacaggactgcaggctggaatatccccatgggcctgctcttcaaccagacgggctcctgcaaatttgatgaatatttcagtcaaagctgtgcccctgggtctgacccgagatctaatctctgtgctctgtgtattggcgacgagcagggtgagaataagtgcgtgcccaacagcaacgagagatactacggctacactggggctttccggtgcctggctgagaatgctggagacgttgcatttgtgaaagatgtcactgtcttgcagaacactgatggaaataacaatgaggcatgggctaaggatttgaagctggcagactttgcgctgctgtgcctcgatggcaaacggaagcctgtgactgaggctagaagctgccatcttgccatggccccgaatcatgccgtggtgtctcggatggataaggtggaacgcctgaaacaggtgttgctccaccaacaggctaaatttgggagaaatggatctgactgcccggacaagttttgcttattccagtctgaaaccaaaaaccttctgttcaatgacaacactgagtgtctggccagactccatggcaaaacaacatatgaaaaatatttgggaccacagtatgtcgcaggcattactaatctgaaaaagtgctcaacctcccccctcctggaagcctgtgaattcctcaggaagtaaaaccgaagaagatggcccagctccccaagaaagcctcagccattcactgcccccagctcttctccccaggtgtgttggggccttggcctcccctgctgaaggtggggattgcccatccatctgcttacaattccctgctgtcgtcttagcaagaagtaaaatgagaaattttgttgatattctctccttaaaaaaaaaaaaaaaaaaaaaaaaaaaaaa

SEQ ID NO: 323 - DNA, 2314 bp, Artificial Sequence
  STMN2
agctcctaggaagcttcagggcttaaagctccactctacttggactgtactatcaggcccccaaaatggggggagccgacagggaaggactgatttccatttcaaactgcattctggtactttgtactccagcaccattggccgatcaatatttaatgcttggagattctgactctgcgggagtcatgtcaggggaccttgggagccaatctgcttgagcttctgagtgataattattcatgggctcctgcctcttgctctttctctagcacggtcccactctgcagactcagtgccttattcagtcttctctctcgctctctccgctgctgtagccggaccctttgccttcgccactgctcagcgtctgcacatccctacaatggctaaaacagcaatggcctacaaggaaaaaatgaaggagctgtccatgctgtcactgatctgctcttgcttttacccggaacctcgcaacatcaacatctatacttacgatgatatggaagtgaagcaaatcaacaaacgtgcctctggccaggcttttgagctgatcttgaagccaccatctcctatctcagaagccccacgaactttagcttctccaaagaagaaagacctgtccctggaggagatccagaagaaactggaggctgcagaggaaagaagaaagtctcaggaggcccaggtgctgaaacaattggcagagaagagggaacacgagcgagaagtccttcagaaggctttggaggagaacaacaacttcagcaagatggcggaggaaaagctgatcctgaaaatggaacaaattaaggaaaaccgtgaggctaatctagctgctattattgaacgtctgcaggaaaagctggtcaagtttatttcttctgaactaaaagaatctatagagtctcaatttctggagcttcagagggaaggagagaagcaatgagaggcatgctgcggaggtgcgcaggaacaaggaactccaggttgaactgtctggctgaagcaagggagggtctggcacgccccaccaatagtaaatccccctgcctatattataatggatcatgcgatatcaggatggggaatgtatgacatggtttaaaaagaactcattataaaaaaaaaaaaacaaaaaaaatcaaaaattaaaaaaaatcaatgcggtctctttgcagaatgttttgcttgatgtttaaaaaataccttggatcttattttgtaaatacttacatttttgttaaaaaatacaagtattgcattatgcaagttatttcataatcttacatgtcctgtaacaggcttttgatgttgtgtctttccactcaaatgaatttgctaggtctgttctttttgaagctccccatgtctaactccattccaaaagaaaaatgaggtcagtagacagtctatggtgctagaaacccaccattgcctaatgacctagaaggctttgttgtctctgagcttgactaagaccatacctagatcacaggtattatgactccacatgaaccttcacatttgttcgctcataatctacttactgcctaaaaactacaaaaccaggctaagaaataccaccagtcatagcatttacttctgcttctcctggattatgtgctacaaatgtgctttggctttagaaagggatggatgagaagacagacctgagaccaatctgggtagaagcaaaaagttgaaccttttaaagtgctgaacacaaatccaaattcgaatggttcaagcagccgtgaaatcgctcttcataaagtgggcttaattctctagtttaagttcttttgatggaatgaattaattaatgtgtcaggtggcttatttgtggatgccatgattgatgatgttcattttaagctcttacctatagtacaagtacatgatgctactgaatatttttccacttggaaactgtgagctggttgttgcattaaaacacacatacaaacaaaatcaaaaacactgcggactttcactcaagctggtctttcttccccagtgtaaggcaatcctgcctactaacaacaccaacaacaaaacactccatctgtgaagctgacgcagttaagggggctaggcagggcatttgtgccaactaagaatcaccagatacccaccataagtacctatcgcagttttgaagtcgtttctccccaactcccaactcctgaaggttgctgcctgcatatttactcttcattagtgctattttcctgtatgtcattgtgagcaagctgtgattaataaagaattggagttctgtgaactaataaaggtttggtctgttaaaaaaaaa

SEQ ID NO: 324 - DNA, 2275 bp, Artificial Sequence
  PHACTR3
atgcgtggccgtggcggggggcgcgcccgctgtcctgcgcccctgcgctcgctgctgggcgccttcggggcccgggacgctgccgccgccgcccgagatcctgcgcaagatgagatggaccaaacgcccccggcgcgtcctgaatatctggtctcagggattcgaactccccctgtgaggaggaacagcaaactggccaccctgggcaggatcttcaaaccctggaaatggaggaaaaagaaaaacgaaaaactgaagcagacaacgtcagcgctggagaagaagatggccggcaggcaaggccgagaggagctcatcaagaaggggctgctggagatgatggagcaggatgctgaaagcaaaacttgcaaccccgatggaggaccccgatctgtacagagtgaaccacccactcccaagtcggagacgctgacttcagaagatgcccagcccggaagccccttggccactgggacggaccaggtctccctggacaagccactgtcctcagctgcccacttggacgatgcagccaagatgccttctgcatccagtggtgaagaagcagacgctggcagcctcctgcccaccaccaatgagctctcccaagccttagctggggctgactccctggacagtcctcccagacctctggagagatccgtgggccagctccccagccccccactgctgcccactccgccacccaaggcaagctccaaaaccacaaaaaatgtcacaggccaagccacactcttccaagcctccagcatgaagagtgccgacccttccctccggggccagctctccacacccacggggtctccgcatctcaccacggtccaccggcctcttcccccaagccgcgtcattgaggagctgcacagggcgctggccacgaagcaccgccaggacagttttcaaggaagagaaagtaaagggtctccaaagaagcggctggatgtccgtctgtcgagaacgtccagcgtggagcggggcaaggagagggaggaggcttggagctttgacggggcattggagaacaagcgaactgccgctaaggaatctgaggagaacaaggagaacctgatcataaattctgaactcaaagacgacttgcttttgtatcaggacgaggaggcgctgaacgactccattatttctggaacactgccacggaaatgcaagaaggagctcctggccgtgaagctaaggaaccggccaagcaaacaggaactagaagaccggaacattttccccagaaggactgatgaagaaagacaggagatccggcagcagatcgagatgaagctttccaaacggctgagccaaagacctgccgtggaagagctggagagaagaaatatcttgaaacaaaggaatgatcagacagagcaggaagaaagaagagaaatcaagcaaagattgacaagaaagcttaatcagagacccactgttgatgaattaagagacagaaaaattctgatacgattcagtgattacgtggaagtagcaaaagcgcaggactatgacaggagggcagacaaaccctggacgagactgtcagcagcagataaggcagcaattcgtaaagaattaaatgagtacaaaagtaatgaaatggaggtacatgcatcaagcaagcacttgacaagattccacaggccatagagattttcttctgagaagaatttgtgtttaattttttgataccaacactgaacattcatcagggaactttcctgaagttcagctcaagactaccctacctgctgtgtttgtgagaagagtaggatcacacacacaggtgcaatcttgaccacacttacctgcaagaggagtaaccagaggacacacttccttccttctttggtgtctgaggagtgtgaactgttggggtcagttaagacccaacataactctatcagaagaaaactgttgtttgcctttcaaccttgttttacagttctgcagtgtaatggaggacgggcaacgtgcatgtgcaggctcaccactcccaggcctctgacatgagggacatgtgacagtgtcattcagtattatgttcaaaagacatttttatcctgatcataattaatttgaaaactctttaagttcatgttatacaagatgatttactgtattatacttttccttttttatataatgtctaacaaaaaatacagctgcaacattttgattcctgttaattttgttctttaattaaatgactacttattgcaggaaattaaaaaaaaaaaaaaaaaaaaaaaaa

SEQ ID NO: 325 - DNA, 3957 bp, Artificial Sequence
  CTSS
gacaagggctcttcttgatggcttactgtatccactttgtccccaagaccatagggaaatgactagaggtgactgtactagctagattttaaatgaaactgaaatgaaagttcacttcctcattttgagtacctcatgtgacaagttccaatttcttttcaagtcaattgaactgaaatctccttgttgctttgaaatcttagaagagagcccactaattcaaggactcttactgtgggagcaactgctggttctatcacaatgaaacggctggtttgtgtgctcttggtgtgctcctctgcagtggcacagttgcataaagatcctaccctggatcaccactggcatctctggaagaaaacctatggcaaacaatacaaggaaaagaatgaagaagcagtacgacgtctcatctgggaaaagaatctaaagtttgtgatgcttcacaacctggagcattcaatgggaatgcactcatacgatctgggcatgaaccacctgggagacatgggttcttgtggtgcttgctgggctttcagtgctgtgggggccctggaagcacagctgaagctgaaaacaggaaagctggtgtctctcagtgcccagaacctggtggattgctcaactgaaaaatatggaaacaaaggctgcaatggtggcttcatgacaacggctttccagtacatcattgataacaagggcatcgactcagacgcttcctatccctacaaagccatggatcagaaatgtcaatatgactcaaaatatcgtgctgccacatgttcaaagtacactgaacttccttatggcagagaagatgtcctgaaagaagctgtggccaataaaggcccagtgtctgttggtgtagatgcgcgtcatccttctttcttcctctacagaagtggtgtctactatgaaccatcctgtactcagaatgtgaatcatggtgtacttgtggttggctatggtgatcttaatgggaaagaatactggcttgtgaaaaacagctggggccacaactttggtgaagaaggatatattcggatggcaagaaataaaggaaatcattgtgggattgctagctttccctcttacccagaaatctagaggatctctcctttttataacaaatcaagaaatatgaagcactttctcttaacttaatttttcctgctgtatccagaagaaataattgtgtcatgattaatgtgtatttactgtactaattagaaaatatagtttgaggccgggcacggtggctcacgcctgtaatcccagtacttgggaggccaaggcaggcatatcaacttgaggccaggagttaaagagcagcctggctaacatggtgaaaccccatctctactaaaaatacaaaaaattagccgagcacggtggtgcatgcctgtaatcccagctacttgggaggctgaggcacgagattccttgaacccaagaggttgaggctatgttgagctgagatcacaccactgtactccagcctggatgacagagtggagactctgtttcaaaaaaacagaaaagaaaatatagtttgattcttcatttttttaaatttgcaaatctcaggataaagtttgctaagtaaattagtaatgtactatagatataactgtacaaaaattgttcaacctaaaacaatctgtaattgcttattgttttattgtatactctttgtctttttaagacccctaatagccttttgtaacttgatggcttaaaaatacttaataaatctgccatttcaaatttctatcattgccacataccattcttattcctaggcaactattaataatctatcctgagaatattaattgtggtattctggtgatggggtttagcaactttgatggaagaaaatattaggctataaatgtcctaaggactcagattgtatctttgtacagaagaggattcaaaacgccacgtgtagtggctcatgcctgtaatcccaacactttgggaggctgaagtaggaggatcgtcttgagcccaggagttcaagaccagcctggacaacatagtgagaccttgtctccacaaaaataaaaaagaaactatccaggagtggtggtgtgtgcctgtggtccctgctatgcagatgtctaagacaggaggatcacaagagcccaggaggttgagaatgcagtgagcttgtaattgcaccactgcactccagcctgggtgacagagcaagaccctgtcttaaaaaaagaggattcaacacatatttttatattatgttaaagtaaagaaatgcataaaagacaagcactttggaagaattattttaatgatcaacaatttaatgtattagtccaaattatttttacgtagtcatcaacaatttgaccagggcctttatttggcaaataactgagccaaccagaataaaataaccaatactccactgctcatatttttatctaattcagatggatcttccttacaactgctctagattagtagatgcatctaagcaggcagcaggaactttaaattttttaagttcatgtctatgacatgaacaatgtgtgggataatgtcattaatatatcctaaattaacctaaacgtatttcactaactctggctccttctccataaagcacattttaaggaacaagaattgctaaatataaaaacataaataataccataatacatggctatcatcaaaagtgtatagaatattatagtttaaaagtatttagttgattacttttcagttttgttttgttttttgagacggagtctcactctgttgcccaggctggagtgcagtggcaccatctcagttcactgcaacttctgcctcccgagttcaagcgattctcctgcctcagcctcccgagtagctggaattataggcgtgcaccaccacgcccagctaatttttgtatttttagtaaagacagggttttgccacattagccaggctggtctcaaactcctgacctcaggtgatccacccaccccagcctcccaaagtgctaagattacaggcgtgagccactgagcccagcctacttttcagtttttaacataatttttgttttatccacaacttttcaagtattgaaagtagaataaaaacatgggttcttagtctttagctatctgttaaagcctatgaatgccttcttaaaatcatgtttttaaatgcataaaatatataggattacaaaggaatctaattatatcgaaatacagttattaaaatgttaaaagataagtttgttatatattaatatgcatgcttctttataaatgcattaaataagagttaatagctatcctaaatttgaaatagtgataagcataatgaaaatagatgcaaaaaactaatgtgatatgaaaatatctgggtttttcttttgatgatgaagtattgctaatattaccgtggtttatgaactatgttcagaattgaagaaaatcctaactttcagttagaggttagtgacggggttcaggacaccctacacaaaatacagcactttgacatattgaatattttaagctgaaggcatttgaggaaattgcagaagcaggaaggtgactctgaccttctgcctgctgttctccccagaagcagccataaaacctgggaaggattttctgaccttcccctgaagtagatcataagactgtcatgtaagaggtgctctcctggcacccagagaaaaggagcatccttacctccaaaagcacagggacacaaagaggaatctaaacaaacaggcctctcagtttcccccagtttattacatttagcttgttcacactttgccctatgacatttctacatcactggctgctcttcatcaaacctactataaaaaacattcaagttcaactgtttctttgggcctttatttccttatggagcccctcgtgtcgtgtaaaacttatattaaataaatgtgcatgcttt

SEQ ID NO: 326 - DNA, 4408 bp, Artificial Sequence
  INTS7
cttttctcccagccgcgggaacctggagtccaagagctccttgagcgcctgcgcagggggtagcagaggcgcggacaaaccgcggggtgaccagggcgcatgcgtaacagggcttgacagcgcgcggaagaaaaaccagcaagaaggcggcgggggaagatggcggtcctggggtagagtttgcaagctttctgactaggctagtcgagtaactattcgggtcatggcgtcaaactcaactaagtctttcctggcagatgccggctatggcgaacaggaactggatgccaactctgcccttatggaattggacaaaggcctaagatctggcaaacttggtgaacagtgtgaagcagttgttcgctttcccagactttttcagaagtatccattccctattcttatcaattctgcattcctaaagttagctgatgttttcagagttgggatgttgggaagtctggcatcaataattcctgagaggaagaatgctcatcatagtattcgtcagagtttagattcacatgataatgtagaagttgaagctgctgtttttgctgctgcaaacttctctgcacagtcaaaggattttgctgtaggaatctgtaacaaaatcagtgaaatgattcaaggtttagcgacaccagtagacttgaagctaaaattgatacccattctacagcacatgcaccatgatgcaatcttggcttccagtgctcgtcagcttttacaacagctggtcacatcctatccgtccaccaaaatggtgattgtgtctttgcacactttcactctgcttgcagcgtcatctttggttgatacacctaagcagattcagcttctgttgcagtatttgaagaatgatcccaggaaggcagtaaagagacttgctattcaagatctgaaattacttgctaataaaacaccacatacttggagtagggagaatattcaggcactttgtgagtgtgccctccagactccttatgacagcttaaaactagggatgttgtctgtcctttccacactatcagggaccatcgccatcaaacattacttcagtatagttccaggaaatgtgagttcttctcccagatcttctgatttagtcaaattagcccaagagtgctgttaccataataacaggggcattgcagctcatggagttagagtcctaactaatataactgtttcttgtcaagaaaaggatcttttggcactggaacaagatgctgtctttggcctggaatccctactggtactttgtagtcaagatgatagtccaggtgctcaggccactttaaagattgctctaaactgtatggtgaagttggccaagggcaggccccatcttagccagtcagtagttgagaccttgttgactcaattgcacagtgctcaagacgctgcccggattttgatgtgccattgcctggcagccattgccatgcaactgccggtgctgggtgatgggatgcttggtgacctcatggagctgtacaaggtgattggacgatcagccacagacaagcaacaagaacttctggtgagtttggctactgtgatttttgttgcaagtcagaaggcattgtctgtggaaagtaaggcagtaattaagcagcagcttgaaagtgtctccaatggatggactgtataccgtattgccagacaggcttccagaatgggtaatcatgacatggccaaagagctttatcagagtttgctgactcaggttgcctcagaacatttctacttctggctaaatagtttgaaggagttttcacatgcagaacagtgtctcactgggttgcaagaggaaaattatagttcagcactttcttgcattgctgaatctttaaaattctatcacaaagggattgcttccttaacagcagctagtacaccactgaatcctttaagctttcagtgtgaatttgtaaaactcaggattgaccttttacaagccttctctcaacttatctgtacttgtaatagcctgaagacaagcccaccacctgcaattgccacaacaattgccatgaccttaggaaatgacctccagaggtgtggtcgcatctccaatcagatgaaacagtccatggaagaatttcgaagccttgcttctcgatatggagatctttaccaggcatcttttgatgctgactcagcaactttgaggaatgttgaactacagcagcagagctgtttactgatatctcatgcaatagaagccctgattttggatccagaatcagcaagtttccaggaatatggatctactggaacagcccatgctgatagtgaatatgaaagaagaatgatgtctgtatataatcatgtcttggaggaggtagaatcactcaatcggaaatatacccctgtttcttatatgcacacagcatgcctctgcaatgccatcattgctttgctgaaagttcccctttctttccagagatattttttccagaaactacagtctaccagcatcaagcttgctctgtcaccatcgccccggaatcctgcagagcccattgctgtccagaataaccagcagctggcgctaaaggtagagggagtggttcagcacggatctaaaccaggactcttccgcaaaattcagtctgtctgtctgaatgtttcttccacactgcagagtaaatctggacaagactacaagatacccattgacaacatgaccaatgagatggagcaaagggttgaacctcataatgattacttcagtactcaatttctgttgaactttgctatccttggaacacacaacattacagtggaatcttctgtgaaagatgccaatggtatagtatggaagactggtcccagaactaccatatttgtaaaatccctggaagacccttattcccagcaaattcgcttacaacagcagcaagcccagcagccattacagcagcagcagcaacgcaatgcctacacacggttttaaccatggaatgaatgcactgcagactctcaagagatcaatcaaattgccagaaacagtttggtttttcatatggaataagtattaaagttacagtgtagttcatttattcattgatttttgtaatgtaatattctggaaaaaattttgttttcttaaaaattttgtctgacagctgggcgtggttgctcacgcctgtaatcccagcactttgggaggctgaggtgggcggctcacgaggagatcaagaccatcctggctaacacagtgaaaccccgtctccactaaaaaatacaaaaaaattagccaagcatggtggcaggcgcctgtagtcccagctacttgggaggctgaggcaggagaatggtgtgaacctgggaggcggagcttgcagtgagccgagactgtgctccagcctgggcgacagagcgagactccgtctcaaaaaaataaataaatacattttgtctgaaaaataactgggatcctggccagaaagattgttctttcttgttttattattagttttttctgttgccaagcttttttttctttcaagaatagtcacatgttgagatcactgaattggtaaatttgaccgctactcttccaaaatacatcatttgctgcctgacttagacctaggattctgagttgttcattgggaggttctgaccagtcactacaaggtttatccatggtagcagaacctgagtccttctgtagatggacttgaaagtgttccgtgcaacatccagccttctggattatgaaagcccacagtctaacagtattgaaacatcctgctgtattagttcaaccacatatttatctcttcctgtgctaaagcagtctttattattttcatatttaattgaaacaaagagcagctagcaatttcatagaaaattaatttgttttttctgatgtgtctgcaactgtgtataatacagacatttcacattgtttccaaaagtgaagaacactcatttaatatcttcaatgttttaagttagaaggggtggatcttttcctttggttggtgattggtttggtttatacttgatgagttatgctagactgattgtttagagagagcagtctctttattacacaggctcagtttgttgggatgctcagggaacagagttttctggttagccagaaaacccccttttttcctattttaattctggttgaaaaccatgataaaatagactttcttagcacagtatggtagatataacttaactgctttttgattggggatcatttagggcttcaggatcacgatttctaaacatcagggatcatatggttgcagatgccgatgctataagtaatttggccggatgcagctcctaaggtaaagcagggtactttccctggaatttcctttttaaataaatatctgtttctttgcttgtgaaaaaaaaaaaaaaaaaa

SEQ ID NO: 327 - DNA, 671 bp, Artificial Sequence
  SPRR1A
ccaagggaccacacagcccattctgctccgtataccagctttctgtctctagaaaaaaacacatttgaagcatgaattctcagcagcagaagcagccttgcaccccaccccctcagcctcagcagcagcaggtgaaacaaccttgccagcctccaccccaggaaccatgcatccccaaaaccaaggagccctgccaccccaaggtgcctgagccctgccaccccaaagtgcctgagccctgccagcccaaggttccagagccctgccagcccaaggtgcctgagccctgcccttcaacggtcactccagcaccagcccagcagaagaccaagcagaagtaatgtggtccacagccatgcccttgaggagctggccactggatactgaacaccctactccattctgcttatgaatcccatttgcctattgaccctgcagttagcatgctgtcaccctgaatcataatcgctcctttgcacctctaaaaagatgtcccttaccctcattctggagggctcctgagcctctgcgtaaggctgaacgtctcactgactgagctagtcttcttgttgctcgggtgcatttgaggatggatttggggaaggatcaagtgaaccatccctagtcttccttcaataaataacttttaactccaaaaaaaaaaaaaaaaa

SEQ ID NO: 328 - DNA, 3096 bp, Artificial Sequence
  WDR27
aaaggggcgtgggcgcgaggggcggcgggctagtaaccatagcggctcgcgtgggtcggctggcaagtaaccatagcggcgagcgtggggcggagtgtggctcggtagtcctctgcgtgccctcctgggagctgggtgctgtgagtcctcccctagcgggctggtctcggcgcggagtcggcgccgaacccgagctgctgctctggggcgtgtgcctagggcgcagggctggagcgcgggggctgcgcggttgctcgcggctccgctgaggtctctaggaaagggggcgatttgagggttccgccgtgaccgcttccaacggcggacacgcgcgctctggaccagagccgttgcccgctgtctcgtcacccgaagcctcctcctgacgccgtgctagtgcgagggtctccaggggaattcggggcacaagtcgggccggagcatccgggcggccgcttgagatcggcgctttgagaactgagcgcatgtggagttcggaggaaaagggctcagattgaagatggaaaatccccaagacattttctcaagtaatggtggctgtctaagtgatatagttatagaaaaatacctggttgaatccaaggagtctgtgtctcatgttcagcttgcttgcagcatgcaggactgtgctttccctttggatggaactgaactttgtatatggaacactaaggatccttctcatcagcttctaatcctacgaggacaccatcagccaattactgctatggcttttggaaataaagtgaacccacttctaatctgctcagcatcactggattatgttataatgtggaacctggatgaatgtagagagaaagtacttcaagcatatcctcttctcagtttattcattgatgcagaaagcaggcagctggtcaccgggtgtgctgacggccagctttggatcttcagtttgatggatggacaccattatcgtcgtgtggcacgggttgacctaaggaagaagacagagactttctccacaagaagggttaagtctgggctgtgcagccagccagaagaaagccagcttccctctacaagtgctctgggaaaaggagagcaggttgaagtaacatttcctgtactgagacttgcaccctgtgatctctcactcatcccaaattctgcatgtggatgtctttcttctgagaacacccgatgtgtgtggatcggaagctcagtgggcttattcgtatttaacctggcaaacctggaagtggaagctgctttgtattacaaggatttccagagcctcagcatcctgctggccggatcgtgtgccctgaggaaccgcactgcggatcaaaaggtgctgtgcttgctggcctccctctttggcgggaagattgccgtgttggagatcaacccggccgcgctagtcagggctcagcagtgccccagcatggggcagagcctctcggtgccagccagctcctgtgtcctaccgacctctccactgtatctgggaattgccaaggagaagagtaccaaggctgctagtgaacagcgacgtgctgcacggaacgtcatgaaggaccaacgcctggttttccatagtaaagttaggtcatctggttatgcgtcagcaccacatgtaactatgttttcaccaaagaccaacatcaagagtgaggggaaaggatcttcaaggagcaggagcagctgcgcacgggaggcataccccgtggagtgcgctgtgcccaccaagcccggcccccaggtcgctgccgcccccacctgcacacgtgtatgctgcatccagtactcaggagatgggcagtggctggcctgtgggttggccaaccatctgttactcgtttttgatgccagcctgactgggacacctgctgtgttttcaggtcacgacggggcagtgaatgccgtgtgctggagccaggaccggaggtggctgctctctgcggcccgggacgggaccctgcgaatgtggtcggctcgtggggcagagctcgcactgcttctgggcaaagacatgttttctaaacctatacagtctgcacagttctattatatagatgcctttatattgttatcttctggccctgaatttcagctactgaggtatcacattgacacttgcaaagatgagattaagagatataaacagaagagcaagtccaagctgatttgcaggctctccacgacgggtgcagtagacatgaccagtttatcggcagtcaacgacttttattcccacatcgtactcgcagctggccggaacaggaccgtggaagtgtttgacctcaacgccggctgcagtgcagcggtgatagcggaagcccactcacggcctgtccatcaaatctgccaaaataaaggttcatcatttacaacccaacagcctcaggcttataaccttttcctgaccacggccattggcgatgggatgagactgtgggacctgagaaccctgaggtgtgagcgccactttgaagggcatccaacccgcggctatccatgtggaatcgctttcagtccttgtggacgattcgcggcttgtggggccgaggacagacacgcttacgtgtatgaaatgggctcaagcacgttttctcaccggctggctgggcacacagacactgtcactggagtggccttcaacccatcagcgccccagcttgccacagctaccttggatggtaaactccagctctttctagctgagtaaccactgacctgtgagctgggtccaggaatgctgtgaggaacaacttaaaagtaagaagtagtggttcatccatcagggggccagaagcagcaactgtttttcatattttgagacttgcctcagatttcccccgtttgcaagctcctcccctctgtgtgtgccatgtcagagttttatgtctttctgctcctcaaaagggatccccttcattgggaaaatggaaatggcgtccagtacttctgcacagaatttggtaaagttaaaacaaaatatctttcaataaaacataatatagtatttgtttgataattagagttggaagaaaaaagagagaatttcttttgggcagtgaaaataaagcagttaacagtcctaaaaaaaaa

SEQ ID NO: 329 - DNA, 3199 bp, Artificial Sequence
  ANKS1B
gtggggggcgcgcgcgcgggcccggggagctcgcggggagagcccggcgctcggcgcagcgcggcgcggccaagctccgcgcctctcccgcccttcctcggcgcgctcgccctcgcctcgccgctcgcattcgctgggggcgcccagaaagatgcacagaggcaacggctaggggagcggaggttcaagccacatgtctgcgtcctcgggggccagagcccgccagccctcgcggatcccggctcgcggccagcccgagcggctcgggttttaaaaatcaatttgattggccacaggaaacgtattttggcatctctgggagacaggctgcacgacgatcccccacagaagccccctcggtccatcaccctcagggaacccagtggtaatcacactcctcctcagttgtctccatcacttagccaaagcacttacaccactggtggctccctagacgttcctcacattatcatgcagggcgatgcaaggaggagaagaaatgaaaactactttgatgatattccccgatcaaaactggagaggcagatggctcagtcgtctgtctgtgaaatatggacgaatcagaacgcaggatttcctttctcagcgatccatcaggttcataatacaggagactggggagaaccttccattaccttgcgacctccgaatgaagccacagcctctaccccggtacagtactggcagcatcacccagaaaagcttatcttccagtcgtgtgattacaaagctttttatttaggttctatgctgataaaagagcttagggggacagaatcaacccaagatgcttgtgcaaaaatgcgggctaactgtcagaagtctacagagcaaatgaagaaggtccctactattattctttctgtctcatataaaggagtcaaatttattgatgcaacaaataagaacataattgctgagcatgaaattcgtaatatctcctgtgctgcccaggacccagaagacctctcaacatttgcctatatcacaaaagatttgaagtctaatcaccactactgtcatgtgtttactgcctttgatgtgaatttagcctatgaaatcatcctaaccctgggacaggcattcgaagtcgcttaccagctagcactacaagcaagaaaagggggacactcctccacacttccagaaagctttgaaaacaaaccctccaaacccatccccaagccccgcgttagcattcgcaagtccgtgcagatcgacccatctgagcaaaagactctggccaatctaccgtggattgtggagccgggccaagaagccaagaggggcattaataccaagtatgaaaccacgattttctgatactcgccgtcctcctgtcctcgcggtgccttgctcgccaagcggtcccggagcaggctttccttcgcgcctccgcgtccacccagcccaggaggaagactgctctgagcgtgcggccttgttacgggcgaaaggccactggccattcctggggaagttctttctgcaccagtgatggaaaacgcaagactttccagtcgcaacccctgagaggcgtgagttgagatgggttttccctgatgctcccgactcccctccccaccacctcccaaggtatttctgatgactccgccccagtacttgctttgcttcatttggggaaaataataccttttctttaaaaaaaaaaaaaaaaaaaaaaaagtaaaggggatctctaatactgcctaaaagtatgctttcactgtcagcagttttaaaggtgaaatcagagcagcactacccctcccacctccaaagcatctgtaaaatcattctatcattgagtatcgtttaatgcaaaaggacaaaaacaactcccgtgatatgattgccaggagattctgtttccccatttctatatttgtggattttatatgtaatcacctatgtcagagaaagaaaacctttcaaccaaatgattggttcaaaaggaaagaatgattcaaagcagaggaatttattatgcacagcaaaatgtgtcttgtattaaatatttttattaaaagaatgtttcattaatgcattgataagaaaactaggttagttgcgagggatgtttctggtttcatttcaaataattaaatttctactgctactaccaagaggactggctcagtggtggcaaaatactggtgatgctccctagagcaggaggcccggaagtgctgacgcagccatcagcctgccaagattgttttttaatcttcacagtgttttaaagaacatgttaaaaaaaaaaaaatctagtgctcctgctgtcaagatttctgtcatggaaaccttgtttgagaaaggtgttaataaaattctattgcaaaaatttctttttctagaaaaaataaatacaaaaaaaaaaaagaagaaattccaaagtaataaaacttttcttgagacaaacaaaaaaaaagtttgcttactatttgattaaataaaatttacttacatttctttaaggtattttaattttttaatgtctctgtggagtatttgtatgataccataatgtatatttatgtagaatcaaattatataaacagtaccaatatcattatagaaaaaaataacattttaatgtatattgttctaacaatcatattgtgaatcattttgaagttcattatagcgatattgataaattgtggaattgtcttaatgtttttttattaactgacattattttaaacctaactgagatgatcagttacattcatcagttggtgagttttgaagaataactacattttatttcaaactaacaaatgtatacggttttagttcagtgttgaagaattttaatacaatattaaattacttgaactgaacagttccttgtatatattttgcctattcactgttgatatgtatgtagcaaaatgagagttaaataacactaaaatatggtaccaggaggcaattgtataggagcaaagttaataggagctttgctgaaacagaagcatatgtgtaaataagcttgggcttccagttataaattttgtaatttttgtcattatttatatcctataaaaaaagcacacaaaaataaaacagaagttgtacagcaaaaaaaaaaaaaaaaaaaaaaaaaaaaaaaaaaaaaaaaaaaaaaaaaaaaaaaaaaaaaaaaaaaaaaaaaaaaaaaaaaaaaaaaaaa

SEQ ID NO: 330 - DNA, 1748 bp, Artificial Sequence
  PRPS1
agctaatcgttgccagcggggtgtggacttcgccgctgaccccacctccgccgctttgggtaatttagagccgcgcgccgggcgggaatgtaagatggcggagtagcaacgcaaagcgcttggtattgagtctgtggccgacttcggttccggtctctgcagcagccgtgatcgcttagtggagtgcttagggtagttggccaggatgccgaatatcaaaatcttcagcggcagctcccaccaggacttatctcagaaaattgctgaccgcctgggcctggagctaggcaaggtggtgactaagaaattcagcaaccaggagacctgagtgacctccattgcagacaggctgaatgtggactttgccttgattcacaaagaacggaagaaggccaatgaagtggaccgcatggtgcttgtgggagatgtgaaggatcgggtggccatccttgtggatgacatggctgacacttgtggcacaatctgccatgcagctgacaaacttctctcagctggcgccaccagagtttatgccatcttgactcatggaatcttctccggtcctgctatttctcgcatcaacaacgcatgctttgaggcagtagtagtcaccaataccatacctcaggaggacaagatgaagcattgctccaaaatacaggtgattgacatctctatgatccttgcagaagccatcaggagaactcacaatggagaatccgtttcttacctattcagccatgtccctttataatagagtaacttctgaggctttttgagaataaaatccaccccacccttgtttccccttggtatttgatgacaaattcagcagaagacccggcttgctccagtgtagctttctacatcccacatcaggtatattagagcttatccgaactggggaaagacggattgagattaactgctgggacctcctacctgcattatctcattctggcttccttgataattctgtgggccttgcagctttaactatagctcagctgctgcaagatttcagacttttgaggatgttgtgtgagggtgtttgactgtgactggggaagctcagactactttgtatgtgaatgcttcagggttttctttgttgagaacaactagcaacaaaggcaacccatgtgtgaccagttctccccaaggtctatgctaaattatagcaagagccctgggcaaccccaaacctagtcctggtagctgagcaccctgtaaggcaggagcaggcagctcagcttgagcagacattgggtggggggtggggggtggttgaggggggaggcagcacagtgcagcaaatgtttcttgggaggaagaagcctgatccatcaccatctgcttgactatgtagcttggattctcctttgtacctatccctttcgatttggctttaccttcatctatcttgatcctttcctggccaaatatcctcttgggcccaaatgaacattgtaccatagtcttctggaaagcaaacatgcttcctgctatgtaattgctaacattcatattagatgatgtgctgtagcttgatcttccttagcctactgccactgaggcagtaggttttaggtggtatcgtagtgccttttgattaatttaagtatttaattttcatcttccttctttggatctatttggcctctcaaatgaactgagattcctgttaaaaaagattgatgttattgtctcttgtagaggaaactaataaagtgtgtgtacctgtgtga

SEQ ID NO: 331 - DNA, 7007 bp, Artificial Sequence
  SORT1
aaacttatgatgaataaagccaggaactcttgcttattttctgtcctccctctgctcctgtcactaactacttctgtaaacataacttcccaacttctactccaactttaaagcatctggttccttaaataaacaggccctgtagagaggccgtgttgtatggggtgtcagctctgggaagaatgcgtgtgtttgtttgctggctctggcagggttgagtccaagctgacaggactgagtgtgcctgtcagaggcttcagggagctgccgctgaagacctcggcctgttgttgtgaatcgccagacctttgtaacacccggaagtctgaagcatgtgtttgatgatctcagaggctcagtatccttgtcctgggttggagatagcactggggtcattctagtcttgactaccttccatgtaccactggtaattatgacttttggacagtccaagctatatcgaagtgaggattatgggaagaactttaaggatattacagatctcatcaataacacctttattcggactgaatttggcatggctattggtcctgagaactctggaaaggtggtgttaacagcagaggtgtctggaggaagtcgtggaggaagaatctttagatcatcagattttgcgaagaattttgtgcaaacagatctcccttttcatcctctcactcagatgatgtatagccctcagaattctgattatcttttagctctcagcactgaaaatggcctgtgggtgtccaagaattttgggggaaaatgggaagaaatccacaaagcagtatgtttggccaaatggggatcagacaacaccatcttctttacaacctatgcaaatggctcctgcactgaccttggggctctggaattatggagaacttcagacttgggaaaaagcttcaaaactattggtgtgaaaatctactcatttggtcttgggggacgtttcctttttgcctctgtgatggctgataaggatacaacaagaaggatccacgtttcaacagatcaaggggacacatggagcatggcccagctcccctccgtgggacaggaacagttctattctattctggcagcaaatgatgacatggtattcatgcatgtagatgaacctggagacactgggtttggcacaatctttacctcagatgatcgaggcattgtctattccaagtctttggaccgacatctctacactaccacaggcggagagacggactttaccaacgtgacctccctccgcggcgtctacataacaagcgtgctctccgaagataattctatccagaccatgatcacttttgaccaaggaggaaggtggacgcacctgaggaagcctgaaaacagtgaatgtgatgctacagcaaaaaacaagaatgagtgcagccttcatattcatgcttcctacagcatctcccagaaactgaatgttccaatggccccactctcagagccgaatgccgtaggcattgtcattgctcatggtagcgtgggggatgccatctcagtgatggttccagatgtgtacatctcagatgatgggggttactcctggacaaagatgctggaaggaccccactattacaccatcctggattctggaggcatcattgtggccattgagcacagcagccgtcctatcaatgtgattaagttctccacagacgaaggtcaatgctggcaaacctacacgttcaccagggaccccatctatttcactggcctagcttcagaacctggagctaggtccatgaatatcagcatttggggcttcacagaatctttcctgaccagccagtgggtctcctacaccattgattttaaagatatccttgaaaggaactgtgaagagaaggactataccatatggctggcacactccacagaccctgaagattatgaagatggctgcattttgggctacaaagaacagtttctgcggctacgcaagtcatccgtgtgtcagaatggtcgagactatgttgtgaccaagcagccctccatctgcctctgttccctggaggactttctctgtgattttggctactaccgtccagaaaatgactccaagtgtgtggaacagccagaactgaagggccacgacctggagttttgtctgtacggaagagaagaacacctaacaacaaatgggtaccggaaaattccaggggacaaatgccagggtggggtaaatccagttcgagaagtaaaagacttgaaaaagaaatgcacaagcaactttttgagtccggaaaaacagaattccaagtcaaattctgttccaattatcctggccatcgtgggattgatgctggtcacagtcgtagcaggagtgctcattgtgaagaaatatgtctgtgggggaaggttcctggtgcatcgatactctgtgctgcagcagcatgcagaggccaatggtgtggatggtgtggatgctttggacacagcctcccacactaataaaagtggttatcatgatgactcagatgaggacctcttggaatagctcttcagaggagctggacccagcatggatggtggaaccacagtacctcttacactccctgtggctccaacttcaggaaataaatttcccattgcgagggacccagctctgtttctgctgcttccatcaaagccaaaaggacctacactaaagaaatgcagggtgggggtggggaaccctgagcacttttttacaattggctctgagaaaaagggagacattttaaattctttaacttcttatttctcgtcctgtctctttgcaaagtatgggcttttttgtttttgttttttaagggaaacgaaatggaattcgaagggaccttttcactaaccccacttctgtgtgttctgcatggcgcctgccccagggcatctgccaactccagtatcagctctcacagtgtacttggtaccatccctgggctctgctggcgagacgaaacagctgtagagatgaaaacaggctgcagaggctggcacagcctggccggcttttctccatctggggacagtcctactccaagaacactgcacaccagctcctcacacagatcccacttactctttttttttttttcagagaccacagaccacagtgatttttcttttcccttgtttaattaggcaatacccttgttaattgccctttggcaactaacttaaccatgtgcttcccacacagtacatcaggaaaacttacagggcaatatttttaacttggggcaggaagaagggagcagcagagaattgactagatatagcacctattaaaagagaactcttgcttcttctgagatttttcaagctgtgctttgtgtgtgtgccagtagacttacgcaaggacagggtacaaacttagctggaagtctgcccaggctgaatgatctcttccctagagttgattgtcgggtacacagtgtgaacccccgaagacggaacctcacagtcttccatgttcccttcttaactgtcgtgtggctcgttgctaaatcatgacaatggctgcctatctgctgcttcttaggttgctgttgtacatggaaccaggactagagattttttcagatttatagacttaaaaaattagaattttattaccaggctttccttctcaccccttttttctgactttgccaagtaatttgttgacacgaaaattttggaggaaccaattgaaaacacacttccagtctagatgatgctttgtgtgatacattaagttcttattttggattaaaagaagttttccatttgatacctctctaaattaaataaattatagaatgtagttgggtggattttggggtggccatatagtaatggaaagctgcaataattagttttaatacagcttgaatatttgctatatagaaatatagtatggaaagtttttggtcttaatgtagctactgtgcgggtcacagtttctcccaatgattatgactgggacattctttggtagataccatttgctactagtttattttgtggctagaaagtcagttttgtgtgtttttttttttttttatttgaagtgccaaattaactttagtcagaatgtgagcagatggctaagttctctcctccccagaatggattaacagctgcgtggaaagtgggggagagagtggatggagacttttagagatgttaaaactgcagtagaatgaaatgagtcagggagcttcagttagaaaataaagttgaggcagtttttgtgaagataatatggttagggctggagtgcactagtctttttgcttattcattttgcatggttttaaaattaaaaataattccgaagatacaccagctcacaaatgaaaacgtcagcctctgccccaccctccctcctgcccaaagtgaatttggtactcagaaaagaactgtttataccactcacctttctcccagcatgtactcactgtgggcagatgcaccaatacatggtaatcctcttactcattttaagacgtaggaaactcaatattcttctctaaccatatacgatagggctcttcgcttttaatgatatctgggatttctgtggaacttggcaaattttcagagcaccttcactcacataatgtcatttgaacctcacaatgttcttgggatggagtcagttgttcagggtccccgtgtgtgtgataagcagtgctggctggctgtcttcagaactcttggaaatctttacacatgcgagtgctaaccactttgagcaaggctgccttcttgtagatgacttgctgttctttatgacagggatcagtggcatttgtttcctagcagtatttagcacctttttgccaccttggtgaacagaaaattgtattttcctgtctttcatggctgaaaacaaaagtaatgggaattttaaatacgtttgcagaaactgcccctcccctcattgagggtcactgctcaagagtgcaggagtggactctccactgatgggtctccctccccatcctggtttccaccccgggctggctagctctgttggtttgaagactgacagccagcctggctcattctcattattggctagttagctttctttatcaacctgctcactcacaaatgtgtgccctcagccagagagtaagaaagcccaaatctgttacagcttctaaaaaaatagatttctaatttgtcctactcatgttaggagcattatctttgaaggtaaaacatagtgtatcattgtgtaaactcccaggcttgatgtagcagaagagatcatttctggaggcttcagcaatggaatttagcattataagagagattggacaaaccagtccaaagtggtccgagttcttaaatccaggtagggaactcactcttctttcttctctggacctaattgggcattgggctttagtgagaccacagaccaggcccgtctctcctgtaggcttttaattcaatggcaactctatttcaaagaataaaagcctttggagagttgcggcagttctgggggcgggctcaggagagtccatagatcagccgtaactggaacgtagaatctacgtctgcctctgaatggacttcccacctcctctctcttgctctgatgcttgcctctgggcctctccatgcccaaggtggtctttcatccttgacaggctggtaatgtgctggccacctccagctcctgcatcgagtctgtaaaccagagctggttctcatggccttcgtcacgataccaggatacggaggggagcccagggccatccatacccaccccagggtaacggggctggcctggcattagtcattatttagtttccaggccaaccatccagatagagattccctctttcctttgagcagtgctctcaagagctccgtgcctgtccacaatgacctagagtgcatcctgctcattgtcagtgtagcccctcgcccctatattcatccaggatacttggaagtgctaaaataggaagggattcggctttcaactttgctaccatcttccctgaagcaggaaaatgaacatggacttaaatgttctttgaaaaaaccaaagttttaagatttgctgtgtgatgaagtgacagggagggccggagtcagcaggtgccagactttctgttctgtctgccatgggtttgtccagctcaggtagctctaggagcaccatcctgccctagcagagcccaggccttgccctcatgaagcatcattgaaatagcaggagcatgttgatttcttggttaggttgcattataataacaagagtcagaacattaattcgaaacaacttgcagtatgcatttcttcacaccagtacattcttaagtgtacttgtttataaggaataacataaactaatctgtacctttatatatatgtgtgtgtacatatatacatatataaactgtatagtgtacatggtaatgatttattgctatgccccagatccttaatgtagttctcatcctccgcatgccctcagccacaagcgggtgactgactgttccctgatgatttggcccacctcctgtgtttggacctctagggaggagggttttggtcatactctccttatcctcgtgcacagaaatgctcagggtccccatgtgcctgttgttcagccctctctcttgttccctttctgagcatgtggtccttccccaggctgtgggacagctgccttcccacgaaagtgtaaagcagtattaagatcattactgcatgtgccctaaaaacccaagttttctattcccttaggacagaaaattgcatgtgaggtgggataatcgagtttcagtgacccacgtcagttacacattaaagccagaccccatgataaaattccacaaaatggaaataaaactcaaatttctttagcattgtgtaaataaatctgaatgtgtttaactttgtactggtaattttctgtatatttggaatatttgggttaaaaataaaacagactggactttgttacctgacctactgaaaaaaaaaaaaaa

SEQ ID NO: 332 - DNA, 5397 bp, Artificial Sequence
  EHF
gcttaacatcctacaaaatgatttaaaattattgttatatgcatttatcttcactctgatgagggctcagacttgataacacccgtggtgccccatccctataggagctggtgagattgcagcctgctgcctcccctccatcagccacagctattggatttcccacccagaatctttaggtaaatgagatcatgattctggaaggaggtggtgtaatgaatctcaaccccggcaacaacctccttcaccagccgccagcctggacagacagctactccacgtgcaatgtttccagtgggttttttggaggccagtggcatgaaattcatcctcagtactggaccaagtaccaggtgtgggagtggctccagcacctcctggacaccaaccagctggatgccaattgtatccctttccaagagttcgacatcaacggcgagcacctctgcagcatgagtttgcaggagttcacccgggcggcagggacggcggggcagctcctctacagcaacttgcagcatctgaagtggaacggccagtgcagtagtgacctgttccagtccacacacaatgtcattgtcaagactgaacaaactgagccttccatcatgaacacctggaaagacgagaactatttatatgacaccaactatggtagcacagtagcagagtcacctgatatgaaaaaggagcaagacccccctgccaagtgccacaccaaaaagcacaacccgagagggactcacttatgggaattcatccgcgacatcctcttgaacccagacaagaacccaggattaataaaatgggaagaccgatctgagggcgtcttcaggttcttgaaatcagaggcagtggctcagctatggggtaaaaagaagaacaacagcagcatgacctatgaaaagctcagccgagctatgagatattactacaaaagagaaattctggagcgtgtggatggacgaagactggtatataaatttgggaagaatgcccgaggatggagagaaaatgaaaactgaagctgccaatactttggacacaaaccaaaacacacaccaaataatcagaaacaaagaactcctggacgtaaatatttcaaagactacttttctctgatatttatgtaccatgaggggaacaagaaactacttctaacgggaagaagaaacactacagtcgattaaaaaaattattttgttacttcgaagtatgtcctatatggggaaaaaacgtacacagttttctgtgaaatatgatgctgtatgtggttgtgattttttttcacctctattgtgaattctttttcactgcaagagtaacaggatttgtagccttgtgcttcttgctaagagaaagaaaaacaaaatcagagggcattaaatgttttgtatgtgacatgatttagaaaaaggtgatgcatcctcctcacataagcatccatatggcttcgtcaagggaggtgaacattgttgctgagttaaattccagggtctcagatggttaggacaaagtggatggatgccgggaagtttaacctgagccttaggatccaatgagtggagaatggggacttccaaaacccaaggttggctataatctctgcataaccacatgacttggaatgcttaaatcagcaagaagaataatggtggggtctttatactcattcaggaatggtttatctgatgccagggctgtcttcctttctcccctttggatggttggtgaaatactttaattgccctgtctgctcacttctagctatttaagagagaacccagcttggttcttttttgctccaagtgcttaaaaataagttggaaaaaggagacggtggtgtggaaatggctgaagagtttgctcttgtatccctatagtccaaggtttctcaatctgcacaattgacatttttggccggagtgttctttgtggtgagggctttcctgtgcattgtaagatgttcagcagtatccactcatggtctctaaccacttgacaccagaaaccccccagctgtgataacgcaaaatgtctctagacatcaccaaatgttccctgggggtggcaaatttgcccttgattgagaaccaccagtttagctagtcaatatgaggatggtggtttattctcagaagaaaaagatatgtaaggtcttttagctccttagagtgaagcaaaagcaagacttcaacctcaacctatctttatgttttaaatgttagggacaataagttgaaatagctagaggagcttcttttcagaaccccagatgagagccaatgtcagataaagtaagcatagtaatgtagcaggaactacaatagaagacattttcactggaattacaaagcagaattaaaattatattgtagaaggaaacaccaagaaaagaatttccagggaaaatcctctttgcaggtattaattcttataattttttgtcttttggattatctgtttactgtctcatctgaactgatcccaggtgaacggtttattgcctagatttgtactcagaggaattttttttgttttgttttgtcttttaagaaaggaaagaaaggatgaaaaaaataaacagaaaactcagctcaggcacaattgtcaccaaggagttaaaagcttcttcttcaatagaggaattgttctgggggtcctggagacttaccattgagccatgcaatctgggaagcacaggaataagtagacactttgaaaatggatttgaatgttctcatcccttttgcagcttttctttttggctctctcatgtccttggcttgctcctctattctacctctctttctccagcaataatatgcaaatgaagacatgtatccataagaaggagtgctcttcatcaactaatagagcacctaccacagtgtcatacctggtagaggtgagcaattcatattcaaaggttgcaaagtgtttgtaatatattcatgaggctggaagtaagaagaattaaaaatttgtcctaattacaatgagaaccattctaggtagtgatcttggagcacacatgaataactttctgaaggtgcaaccaaatccatttttatttctgcctggcttggtcacttctgtaaaggtttaacttagtgttgtcaagtaacagttactgaaagagctgagaaaaagaacaatgaacagcaacgatcttgactgtgcaactcagacattcctgcagaaaagacatatgttgctttacaagaaggccaaagaactatggggccttcccagcatttgactgttcattgcatagaatgaattaaatatccagttacttgaatgggtataacgcatgaatatttgtgtgtctgtgtgtgtgtctgagttgtgtgattttattaggggcatctgccaattctctcactgtggttccttctctgactttgcctgttcatcatctaaggaggctagatccttcgctgacttcaccattcctcaaacctgtaagtttctcacttcttccaaattggctttggctctttctgcaacctttccattcaagagcaatctttgctaaggagtaagtgaatgtgaagagtaccaactacaacaattctacagataattagtggattgtgttgtttgttgagagtgaaggtttcttggcatctggtgcctgattaaggcttgagtattaagttctcagcatatctctctattgtcttgacttgagtttgctgcattttctatgtgctgttcgtgacttggagaacttaaagtaatcgagctatgccaacttggggtggtaacagagtacttcccaccacagtgttgaaagggagagcaaagtcttatggataaaccctcctttcttttggggacacatggctctcacttgagaagctcacctgtgctgaatgtccacatggtcactaaacatgttatccttaaaccccccgtatgcctgagttgaaagggctctctcttattaggttttcatgggaacatgaggcagcaaatctattgctaagactttaccaggctcaaatcatctgaggctgatagatatttgacttggtaagacttaagtaaggctctggctcccaggggcataagcaacagtttcttgaatgtgccatctgagaagggagacccaggttgtgagttttcctttgaacacattggtcttttctcaaagttcctgccttgctagactgttagctctttgaggacagggactatgtcttatcaatcactattattttcctgttacctagcatgggacaagtacacaacacatatttgttcaatgaatgaatgaatgtcttctaaaagactcctctgattgggagaccatatctataattgggatgtgaatcatttcttcagtggaataagagcacaacggcacaaccttcaaggacatattatctactatgaacattttactgtgagactctttattttgccttctacttgcgctgaaatgaaaccaaaacaggccgttgggttccacaagtcaatatatgttggatgaggattctgttgccttattgggaactgtgagacttatctggtatgagaagccagtaataaacctttgacctgttttaaccaatgaagattatgaatatgttaatatgatgtaaattgctatttaagtgtaaagcagttctaagttttagtatttgggggattggtttttattatttttttcctttttgaaaaatactgagggatcttttgataaagttagtaatgcatgttagattttagttttgcaagcatgttgtttttcaaatatatcaagtatagaaaaaggtaaaacagttaagaaggaaggcaattatattattcttctgtagttaagcaaacacttgttgagtgcctgctatgtgcacggcatgggcccatatgtgtgaggagcttgtctaattatgtaggaagcaatagatctcggtagttacgtattgggcagatacttactgtatgaatgaaagaacatcacagtaatcacaatatcagagctgaattatcctcagtgtagcttcttggaattcagtttctggaactagagatagagcatttattaaaaaaaactcctgttgagactgtgtcttatgaacctctgaaacgtacaagccttcacaagtttaactaaattgggattaatctttctgtagttatctgcataattcttgtttttctttccatctggctcctgggttgacaatttgtggaaacaactctattgctactatttaaaaaaaatcagaaatctttccctttaagctatgttaaattcaaactattcctgctattcctgttttgtcaaagaattatatttttcaaaatatgtttatttgtttgatgggtcccaggaaacactaataaaaaccacagagaccagcctggaaaaaaaaaaaaaaaaaa

SEQ ID NO: 333 - DNA, 3718 bp, Artificial Sequence
  RFX4
gttgccatggcaacccactgacctgagccaccccctggagaggccacagctgctggcttcctgggcttctccaaactcctgtgtgtcgccactgccaccggcagggagccaggagagagacagaaaggggctgagacagaatgatcaaaaggagagcccaccctggtgcgggaggcgacaggaccaggcctcgacggcgccgttccactgagagctggattgaaagatgtctcaacgaaagtgaaaacaaacgttattccagccacacatctctggggaatgtttctaatgatgaaaatgaggaaaaagaaaataatagagcatccaagccccactccactcctgctactctgcaatggctggaggagaactatgagattgcagagggggtctgcatccctcgcagtgccctctatatgcattacctggatttctgcgagaagaatgatacccaacctgtcaatgctgccagctttggaaagatcataaggcagcagtttcctcagttaaccaccagaagactcgggacccgaggacagtcaaagtaccattactatggcattgcagtgaaagaaagctcccaatattatgatgtgatgtattccaagaaaggagctgcctgggtgagtgagacgggcaagaaagaagtgagcaaacagacagtggcatattcaccccggtccaaactcggaacactgctgccagaatttcccaatgtcaaagatctaaatctgccagccagcctgcctgaggagaaggtttctacctttattatgatgtacagaacacactgtcagagaatactggacactgtaataagagccaactttgatgaggttcaaagtttccttctgcacttttggcaaggaatgccgccccacatgctgcctgtgctgggctcctccacggtggtgaacattgtcggcgtgtgtgactccatcctctacaaagctatctccggggtgctgatgcccactgtgctgcaggcattacctgacagcttaactcaggtgattcgaaagtttgccaagcaactggatgagtggctaaaagtggctctccacgacctcccagaaaacttgcgaaacatcaagttcgaattgtcgagaaggttctcccaaattctgagacggcaaacatcactaaatcatctctgccaggcatctcgaacagtgatccacagtgcagacatcacgttccaaatgctggaagactggaggaacgtggacctgaacagcatcaccaagcaaaccctttacaccatggaagactctcgcgatgagcaccggaaactcatcacccaattatatcaggagtttgaccatctcttggaggagcagtctcccatcgagtcctacattgagtggctggataccatggttgaccgctgtgttgtgaaggtggctgccaagagacaagggtccttgaagaaagtggcccagcagttcctcttgatgtggtcctgtttcggcacaagggtgatccgggacatgaccttgcacagcgcccccagcttcgggtcttttcacctaattcacttaatgtttgatgactacgtgctctacctgttagaatctctgcactgtcaggagcgggccaatgagctcatgcgagccatgaagggagaaggaagcactgcagaagtccgagaagagatcatcttgacagaggctgccgcaccaaccccttcaccagtgccatcgttttctccagcaaaatctgccacatctgtggaagtgccacctccctcttcccctgttagcaatccttcccctgagtacactggcctcagcactacaggagcaatgcagtcttacacgtggtctctaacatacacagtgacgacggctgctgggtccccagctgagaactcccaacagctgccctgtatgaggaacactcatgtgccttcttcctccgtcacacacaggataccagtttatccccacagagaggaacatggatacacgggaagctataactatgggagctatggcaaccagcatcctcaccccatgcagagccagtatccggccctccctcatgacacagctatctctgggccactccactatgccccttaccacaggagctctgcacagtacccttttaatagccccacttcccggatggaaccttgtttgatgagcagtactcccagactgcatcctaccccagtcactccccgctggccagaggtgccctcagccaacacgtgctacacaagcccgtctgtgcattctgcgaggtacggaaactctagtgacatgtatacacctctgacaacgcgcaggaattctgaatatgagcacatgcaacactttcctggctttgcttacatcaacggagaggcctctacaggatgggctaaatgactgctatcataggcatccatatttaatattaataataataattaataataataataaacccaacacccatcccccagaagactttatctctatacattgtaactcatgggctattcctaagtgcccattttcctaatgaacatgaggatgggatcaatgtgggatgaataaactttagttcagaaacaggacttactaaaagtcagtgggactgggtttctgtagccaagccagacttgactgtttctgtagagcactatctcgggcaggccattctgtgccttttccctctgttccatgactttgctttgtgttggcaaccacttctagtaagctactgattttcctgttgacaaaatctctttagtcttgaaggatggatactggagacagaatctggtttgtgttcttggatgggcacataatttaccaagagcattcaccttgccatctgtcttgtcattgtactgtacaaggaacagccctcagacgtgttctgcacatcccttcttcctggtggtaccatccctatttcctggagcaccagggctaaatggggagctatctggaaactctagattttctgtcatacccacatctgtcacagtacctgcattgtcttggaatgtaagcactgtcttgagggaaggaagaggtctgttctgtattgccttaagttgattgaggtttgtaggagactggttcttctacatacaaggatttgtcttaagtttgcacaatggctagtgtcagcaaaaggcaggagagggtttttgttttttttttaagttctatgagaatgtggatttatggcattgagtatcacactcagctctgctgtgttaactttgtgaaactggatggaacaaactttaacttaccaagcaccaagtgtgaaagtgactttcacggttccttcataaaactataataatatccgacactttgatagaaaaaaattcaaagctgtgcctttgagcctatactatactgtgtatgtgtggaaataaaaatgtattgtacttttggagaattttttgtaggcatttttctgtcagatttgtagtaatttgtgaggtttgttagagattaatataggttttctttctgtattataaaatgcaccaagcaattatggtggacctattaccctatgggtaagaaataaatggaaatatgacatcggatgtttcagcaactgttctgtaaataaaatctttgatcacaccactcagtgtgataattgtgtctacagctaaaatggaaatagttttatctgtacagttgtgcaagatatgaatggtttcacactcaaataaaaaatattgaaacgacaaaaaaaa

SEQ ID NO: 334 - DNA, 5589 bp, Artificial Sequence
  PTPRZ1
acagccgggctggagcgcgcacccggcactgaggcttcgctgctctcggagcgctcagaccgcggccgccgcagccggcgaaagaggcaaagtcccgcacgccggaggacatgcgcctcggctagcggccccgggccccaccaccgtgcggctttctccagattattcctctctcgctgtctctgactgtctctctctgtctctgtctctgtctctctctctctcacacacacacacacacacacaaacacacatacgcacgcacgatctcacttcgatctatacactggaggattaaaacaaacaaacaaaaaaaacatttccttcgctccccctccctctccactctgagaagcagaggagccgcacggcgaggggccgcagaccgtctggaaatgcgaatcctaaagcgtttcctcgcttgcattcagctcctctgtgtttgccgcctggattgggctaatggatactacagacaacagagaaaacttgttgaagagattggctggtcctatacaggagcactgaatcaaaaaaattggggaaagaaatatccaacatgtaatagcccaaaacaatctcctatcaatattgatgaagatcttacacaagtaaatgtgaatcttaagaaacttaaatttcagggttgggataaaacatcattggaaaacacattcattcataacactgggaaaacagtggaaattaatctcactaatgactaccgtgtcagcggaggagtttcagaaatggtgtttaaagcaagcaagataacttttcactggggaaaatgcaatatgtcatctgatggatcagagcatagtttagaaggacaaaaatttccacttgagatgcaaatctactgctttgatgcggaccgattttcaagttttgaggaagcagtcaaaggaaaagggaagttaagagctttatccattttgtttgaggttgggacagaagaaaatttggatttcaaagcgattattgatggagtcgaaagtgttagtcgttttgggaagcaggctgctttagatccattcatactgttgaaccttctgccaaactcaactgacaagtattacatttacaatggctcattgacatctcctccctgcacagacacagttgactggattgtttttaaagatacagttagcatctctgaaagccagttggctgttttttgtgaagttcttacaatgcaacaatctggttatgtcatgctgatggactacttacaaaacaattttcgagagcaacagtacaagttctctagacaggtgttttcctcatacactggaaaggaagagattcatgaagcagtttgtagttcagaaccagaaaatgttcaggctgacccagagaattataccagccttcttgttacatgggaaagacctcgagtcgtttatgataccatgattgagaagtttgcagttttgtaccagcagttggatggagaggaccaaaccaagcatgaatttttgacagatggctatcaagacttgggtgctattctcaataatttgctacccaatatgagttatgttcttcagatagtagccatatgcactaatggcttatatggaaaatacagcgaccaactgattgtcgacatgcctactgataatcctgaacttgatcttttccctgaattaattggaactgaagaaataatcaaggaggaggaagagggaaaagacattgaagaaggcgctattgtgaatcctggtagagacagtgctacaaaccaaatcaggaaaaaggaaccccagatttctaccacaacacactacaatcgcatagggacgaaatacaatgaagccaagactaaccgatccccaacaagaggaagtgaattctctggaaagggtgatgttcccaatacatctttaaattccacttcccaaccagtcactaaattagccacagaaaaagatatttccttgacttctcagactgtgactgaactgccacctcacactgtggaaggtacttcagcctctttaaatgatggctctaaaactgttcttagatctccacatatgaacttgtcggggactgcagaatccttaaatacagtttctataacagaatatgaggaggagagtttattgaccagtttcaagcttgatactggagctgaagattcttcaggctccagtcccgcaacttctgctatcccattcatctctgagaacatatcccaagggtatatattttcctccgaaaacccagagacaataacatatgatgtccttataccagaatctgctagaaatgcttccgaagattcaacttcatcaggttcagaagaatcactaaaggatccttctatggagggaaatgtgtggtttcctagctctacagacataacagcacagcccgatgttggatcaggcagagagagctttctccagactaattacactgagatacgtgttgatgaatctgagaagacaaccaagtccttttctgcaggcccagtgatgtcacagggtccctcagttacagatctggaaatgccacattattctacctttgcctacttcccaactgaggtaacacctcatgcttttaccccatcctccagacaacaggatttggtctccacggtcaacgtggtatactcgcagacaacccaaccggtatacaatgaggccagtaatagtagccatgagtctcgtattggtctagctgaggggttggaatccgagaagaaggcagttataccccttgtgatcgtgtcagccctgacttttatctgtctagtggttcttgtgggtattctcatctactggaggaaatgcttccagactgcacacttttacttagaggacagtacatcccctagagttatatccacacctccaacacctatctttccaatttcagatgatgtcggagcaattccaataaagcactttccaaagcatgttgcagatttacatgcaagtagtgggtttactgaagaatttgagacactgaaagagttttaccaggaagtgcagagctgtactgttgacttaggtattacagcagacagctccaaccacccagacaacaagcacaagaatcgatacataaatatcgttgcctatgatcatagcagggttaagctagcacagcttgctgaaaaggatggcaaactgactgattatatcaatgccaattatgttgatggctacaacagaccaaaagcttatattgctgcccaaggcccactgaaatccacagctgaagatttctggagaatgatatgggaacataatgtggaagttattgtcatgataacaaacctcgtggagaaaggaaggagaaaatgtgatcagtactggcctgccgatgggagtgaggagtacgggaactttctggtcactcagaagagtgtgcaagtgcttgcctattatactgtgaggaattttactctaagaaacacaaaaataaaaaagggctcccagaaaggaagacccagtggacgtgtggtcacacagtatcactacacgcagtggcctgacatgggagtaccagagtactccctgccagtgctgacctttgtgagaaaggcagcctatgccaagcgccatgcagtggggcctgttgtcgtccactgcagtgctggagttggaagaacaggcacatatattgtgctagacagtatgttgcagcagattcaacacgaaggaactgtcaacatatttggcttcttaaaacacatccgttcacaaagaaattatttggtacaaactgaggagcaatatgtcttcattcatgatacactggttgaggccatacttagtaaagaaactgaggtgctggacagtcatattcatgcctatgttaatgcactcctcattcctggaccagcaggcaaaacaaagctagagaaacaattccagctcctgagccagtcaaatatacagcagagtgactattctgcagccctaaagcaatgcaacagggaaaagaatcgaacttcttctatcatccctgtggaaagatcaagggttggcatttcatccctgagtggagaaggcacagactacatcaatgcctcctatatcatgggctattaccagagcaatgaattcatcattacccagcaccctctccttcataccatcaaggatttctggaggatgatatgggaccataatgcccaactggtggttatgattcctgatggccaaaacatggcagaagatgaatttgtttactggccaaataaagatgagcctataaattgtgagagctttaaggtcactcttatggctgaagaacacaaatgtctatctaatgaggaaaaacttataattcaggactttatcttagaagctacacaggatgattatgtacttgaagtgaggcactttcagtgtcctaaatggccaaatccagatagccccattagtaaaacttttgaacttataagtgttataaaagaagaagctgccaatagggatgggcctatgattgttcatgatgagcatggaggagtgacggcaggaactttctgtgctctgacaacccttatgcaccaactagaaaaagaaaattccgtggatgtttaccaggtagccaagatgatcaatctgatgaggccaggagtctttgctgacattgagcagtatcagtttctctacaaagtgatcctcagccttgtgagcacaaggcaggaagagaatccatccacctctctggacagtaatggtgcagcattgcctgatggaaatatagctgagagcttagagtctttagtttaacacagaaaggggtgggggaactcacatctgagcattgttttcctcttcctaaaattaggcaggaaaatcagtctagttctgttatctgttgatttcccatcacctgacagtaactttcatgacataggattctgccgccaaatttatatcattaacaatgtgtgcctttttgcaagacttgtaatttacttattatgtttgaactaaaatgattgaattttacagtatttctaagaatggaattgtggtatttttttctgtattgattttaacagaaaatttcaatttatagaggttaggaattccaaactacagaaaatgtttgtttttagtgtcaaatttttagctgtatttgtagcaattatcaggtttgctagaaatataacttttaatacagtagcctgtaaataaaacactcttccatatgatattcaacattttacaactgcagtattcacctaaagtagaaataatctgttacttattgtaaatactgccctagtgtctccatggaccaaatttatatttataattgtagatttttatattttactactgagtcaagttttctagttctgtgtaattgtttagtttaatgacgtagttcattagctggtcttactctaccagttttctgacattgtattgtgttacctaagtcattaactttgtttcagcatgtaattttaacttttgtggaaaatagaaataccttcattttgaaagaagtttttatgagaataacaccttaccaaacattgttcaaatggtttttatccaaggaattgcaaaaataaatataaatattgccattaaaaaaaaaaaa

SEQ ID NO: 335 - DNA, 4462 bp, Artificial Sequence
  SNAP91
agctgaggtgggggcggggatggggacgcagctcggagcgctagagagacgcggcggcgctggcagaagaggcggcggcgggcgggtactggcttctggggccaggggccaggggcggtgggcgccgggaccgcggagctgaggagcggggcccggccagggctggagactttgcgcccgggggcaccggggctacgcgcggtcgcacacatccaccggcgcggcttccctcggcggcccgggctccgctcatcctgcggcgggcggcgccgctcaggggcgggaagaggaggcggtagacgcgaccacagaagatgtcgggccaaacgctcacggatcggatcgccgccgctcagtacagcgttacaggctctgctgtagcaagagcggtctgcaaagccactactcatgaagtaatgggccccaagaaaaagcacctggactatttgatccaggctaccaacgagaccaatgttaatattcctcagatggccgacactctctttgagcgggcaacaaacagtagctgggtggttgtgtttaaggctttagtgacaacacatcatctcatggtgcatggaaatgagagatttattcaatatttggcttctagaaatacactattcaatctcagcaattttttggacaaaagtggatcccatggttatgatatgtctaccttcataaggcgctatagtagatatttgaatgaaaaggctttttcttacagacagatggcctttgattttgccagggtgaagaaaggggccgatggtgtaatgaggacaatggctcccgaaaagctgctaaagagtatgccaatactacagggacaaattgatgcactgcttgaatttgatgtgcatccaaatgaactaacaaatggtgtcataaatgcagcatttatgcttcttttcaaagatcttatcaaactttttgcttgctacaatgatggtgttattaacttactcgaaaagttttttgaaatgaagaaaggacaatgtaaagatgctctagaaatttacaaacgatttctaactagaatgacacgagtgtctgaatttctcaaggttgcagagcaagttggtattgataaaggtgacattcctgacctcacacaggctcccagcagtcttatggagacgcttgaacagcatctaaatacattagaaggaaagaaacctggaaacaatgaaggatctggtgctccctctccattaagtaagtcttctccagccacaactgttacgtctcctaattctacaccagctaaaactattgacacatccccaccggttgatttatttgcaactgcatctgcggctgtcccagtcagcacttctaaaccatctagtgatctcctggacctccagccagacttttcctctggaggggcagcagcagccgcagcaccagcaccaccaccacctgctggaggagccactgcatggggagaccttttgggagaggattctttggctgcactttcctctgttccctctgaagcacagatttcagatccatttgcaccagaacctacccctcctactacaactgctgaaattgcaactgcctcagcttctgcctccactactacaactgttactgctgtcactgctgaagtggatctctttggagatgcctttgcagcttctcctggggaggcccctgcagcatccgaaggggccgccgcaccagctaccccaacccctgtagcagcagcacttgatgcatgttcaggaaatgacccctttgccccgtctgaaggtagtgcagaggctgcacctgagctggacctctttgcaatgaagccacctgagaccagtgttcctgtagttacccctacagctagcacagcccctccagttcccgcaactgctccttctcctgctcctgccgttgcagctgctgctgctgccactactgctgccaccgccgctgccaccaccactaccaccacctccgctgccaccgccaccactgctcctcctgctctagatatctttggtgatttatttgagtccactcctgaagttgctgcagcgcctaagccagatgctgctcctagcatagacctgtttagtacagatgctttctcctctccaccacaaggggcctctcctgtgcctgagagttctctcactgctgacctcttatctgtggatgcatttgcagcaccatctcctgcaaccactgcctcgccagcaaaggtggattcttcaggtgtcatagacctttttggggatgcatttggaagtagtgcttctgaaccccaacctgcatctcaggctgcttctagttcatcagcatcggcagacctactagctggatttgggggttctttcatggcgccttccccatctccagtgactccagctcagaataacctgctacagcccaattttgaggcagcttttgggacaacgccttcaacttccagcagcagctcctttgatccatcagtgtttgatggtctaggtgatcttttgatgccaaccatggcaccagctgggcagcctgcacctgtctcaatggtaccacccagtcctgcaatggcagccagcaaagcccttggaagtgatcttgattcatctcttgccagcttagtaggcaatcttggaatttctggtaccacaacaaaaaagggagatcttcagtggaatgctggagagaaaaagttgactggtggagccaactggcagcctaaagtagctccagcaacctggtcagcaggcgttccaccaagtgcacctttgcaaggagctgtacctccaaccagttcagttcctcctgttgccggggccccatcggttggacaacctggagcaggatttggaatgcctcctgctgggacaggcatgcccatgatgcctcagcagccggtcatgtttgcacagcccatgatgaggcccccctttggagctgccgctgtacctggcacgcagctttctccaagccctacacctgccagtcagagtcccaagaaacctccagcaaaggacccattagcggatcttaacatcaaggatttcttgtaaacaatttaagctgcaatatttgtgactgaataggaaaataaatgagtttggagacttcaaataagattgatgctgagtttcaaagggagccaccagtaccaaacccaatacttactcataacttctcttccaaaatgtgtaacacagccgtgaaagtgaacattaggaatatgtactaccttagctgttatccctactcttgaaattgtagtgtatttggattatttgtgtattgtacgatgtaaacaatgaatggatgttactgatgccgttagtgcttttttggacttcacctgaggacagatgatgcagctgttgtgtggcgagctatttggaaagacgtctgtgtttttgaaggtttcaatgtacatataacttttgaacaaaccccaaactcttcccataaattatcttttcttctgtatctctgttacaagcgtagtgtgataataccagataataaggaaaacactcataaatatacaaaactttttcagtgtggagtacatttttccaatcacaggaacttcaactgttgtgagaaatgtttatttttgtggcactgtatatgttaagaaattttattttaaaaaatataaaggttaacgtccataataaatacttctctttgaagctaccttatcaagaacgaaaaatcgtatgggaagaatcccctatttatcactgctatattaaaatatatatattttaattatatttgacaggttttgcatctaaattgacctatttattcattcttgattaaatgcactgaaaagtaaagggtctgtttgtgtcatgttcatgaaaatgcggttagagaggtgctattcaagtgattctgaaggcaccccaaggtatatctgtaatttaaagattactgcaaatatctttactttactgtgggtttttagtacatctgttaatttagtgtttctttgtgtgttttgtagactagtgttcttccatccttcaactgagctcaaagtaggttttgttgtaacattgtgattaggatttaaactaattcagagaattgtatcttttactgtacatactgtattctttaagttttaatttgttgtcatactgtctgtgctgatggcttggcttaagattttgatgcataaatgaggtcactgttgatcagtgttgctagtagcttggcagctcttcataaaagcatattgggttggaaaggtgtttgcctatttttcaaattatttaatagatgtatggtaccatttaaaagtggttgtatctgaatttactgtggggataacatacactgtaatggggaaaaattacctaaaaccaatttcaaaatggctttctttgtatttcagtttaaaaacccagtgcatgtacgccctctgagatgcaataaacaccttgaacaaagaaatgcaaaaaaaaaaaaaaaa

SEQ ID NO: 336 - DNA, 1821 bp, Artificial Sequence
  RTN1
cccgtctccagggtagcacccttgggcagcccagccaacgctgtcgcgtggagcggcgcccgcatccccatgcgcgcaggcggctccggggccgcgccgcgctgattcgctgccggccgcgcagactgcggcgccagcgacgctcccgcccctcaccgcgcgccgcctggtgcagcctcagtctctccgcagccgcgcggccactgcgagcccagccgcagcagccgggcaccaacgcttgagtgcacgctcggcgcccccgaggagagccacggcgagcccccaaagcccgcacgatgcaggccactgccgattccaccaagatggactgtgtgtggagcaactggaaaagtcaggtttcttcaaggaaagtccatgaagtgcctgccattcacagacttcttgagcaggtggcctcctggttggagatttaggaggcttccctagagggcatgccatttctaccagctattgacctgttgtattggcgggacatcaagcagacgggcatcgtgtttgggagtttcctgctgctgctcttctccctgacccagttcagcgtggtgagcgtcgtggcctacctggccctggccgcactctcagccaccatcagtttccgcatctacaagtctgttttacaagcagtgcagaaaaccgacgaaggccaccctttcaaggcctacttggagcttgagatcaccctttctcaggagcagattcagaagtacacggactgcctgcagttctacgtgaacagcacacttaaggaactgaggaggctcttccttgtccaggacctggtggattccttaaaatttgcagtcctgatgtggctcctgacctacgttggcgctctcttcaatggcctgaccctgctgctcatggctgtggtttcaatgtttactctacctgtagtgtatgttaagcaccaggcacagattgaccaatatctgggacttgtgaggactcacataaatgctgttgtggcaaagattcaggctaaaatcccaggcgctaagaggcacgctgagtaaactgatttcccaccggggactggacacaaacaggaatgtctggagtggtaacagctctcttcttactcattactgcaaattgattgtctttcccccctccctccagtaccataatcttagagacaaaccttaaaacagctgtttttaggctgttccttgtactcttaggatatttgagtcacttgtgtcaaccactaaagtatagagaaaagtgtattagatgtggtttttaattttgtgttgctaaaaaaagtgcatgatggtgagagcccaagttatctttccctcttcggtgttcttcttctcttctctgcaatgcttctgtagcttctaatgttccccgtggctaggcctttcctgccgagtgctctgatgcaatagtggaaatcgcttatatgtccttgggttgctggttggattaatctttaataacaatatatagaattgtagactgatgttttagcatttttccaacacacacaacgtaaaaataaaagcagtcgaccgcacttatggtaatcagttttgtataacttaaaataattaaataaatgaataaatccaaaacaaacatgcagtacttttgttgtatgggattggtgggctgatttacatgtatggttactaaaaagtaccagcatgttaactttattacaatttgtattactttctctgtagttcctaatggattcaattacggactctggatatttgcacttatgtacttgatactgaatgcataaataaatgttactaaatgtagaatgttaaaaaaaaaaaaaaaaaa

SEQ ID NO: 337 - DNA, 10806 bp, Artificial Sequence
  SLC24A2
cataaatgatgaaagtttcctgtgaagcataacaatccctgattgtgaaagtaccccacaagcatcgttaactataaagtaaggaaaagtatgaaagaaccatctggttgagtctaaagttggaagatcaccatatccaccagaagacccaggatggatctgcaacaaagcaccaccatcacttccctagagaaatggtgtttggatgagtcactgtctggctgcagaagacattatagtgtcaagaaaaaactgaagttaattcgagtcttaggccttttcatgggtctggtagccattagcactgtctcattttcaatcagtgccttttctgagacagatacacagagcacaggagaggccagtgttgtaagtggccctagggtagcacagggttaccatcagagaactctcttagatttaaatgacaagattctggattatactccacagccacctctttctaaggaaggcgagtctgagaatagtacagatcacgcccaaggagactacccgaaagacatcttttcccttgaggagagaagaaaaggtgcgatcattctgcatgtcattggaatgatctacatgttcatagccttagccattgtctgtgatgagttctttgttccttctttgactgtcatcactgaaaaactgggcatctctgatgatgtggctggagccaccttcatggctgcaggagggtcagccccagaacttttcacatctctcataggggtatttatcgctcacagcaacgttggcataggcacaattgtaggttcagcagtattcaacatcctctttgttattggcatgtgtgctctgttttctagagaaatcttaaacctgacatggtggccgctctttcgagatgtgtctttctacattgttgacttgatcatgctgatcatatttttcctggataatgtcatcatgtggtgggaaagcttgcttctcttaacagcttatttttgctatgtggttttcatgaaattcaacgtccaagtagaaaaatgggtgaagcaaatgataaaccgcaataaggtcgtcaaggtgacagcaccagaagcccaagcaaagccatctgcagccagggacaaggatgaaccaactctaccggctaagccgcgtctccagcgaggtggaagctctgcctccctccacaacagtctcatgaggaatagcatcttccaactcatgatacacacccttgacccactcgccgaagggaggttcagagaaaaggcttcaattctccacaagatcgccaagaagaaatgtcatgtggatgagaacgagaggcagaatggggctgccaaccacgtggaaaaaattgagcttccaaacagcaccagcacagatgttgaaatgacaccatccagtgatgcttcagaacctgtacaaaatggaaatctctcccacaacattgaaggtgcagaagcccagaccgctgatgaggaggaggaccagcctctcagccttgcctggccttctgaaacccgcaagcaagtcacgtttctgattgttttccccatagtgtttcctctctggattacgttacctgacgttcgcaaaccttcatcgaggaagttttttcccatcacgttctttggctccattacctggattgcagtattctcttacttgatggtctggtgggcgcaccaggttggagagacaattggcatcagtgaagagattatgggcctgaccatcttggctgctgggacctccatccctgatcttatcaccagtgtcatagtggcccggaaggggttaggggacatggctgtgtccagctctgttggaagcaacatttttgacatcactgtagggctcccactgccctggctcctgtacaccgtcattcacagattccagccagtggctgtcagcagcaatggccttttctgtgccatcgtccttctcttcatcatgctgctcttcgtcatcctctctatcgccctctgcaagtggcgaatgaacaaaatcctgggcttcatcatgtttggcctctactttgtgttcctggtggtgagcgttctcctagaagacagaattcttacatgccccgtctccatctagcaggaaaagccatatcttgcaccagcagcatgaatggtccctccacactctgggctctgggctccttgacctcttgagaagaggcagctggcacacagccctgggtgccaagtgtccctccttggtgaatttgaggagagatggattcacactgggcccattcacttcacaggctgcttccaccctgcctactgaaatgacttcatgtaaaagacaaagagaaccgtcaatacagggcttctccctattcaccactgacaagtacacctcgctggtcggaggtacagtcgatgcaaacaaggacacaggctatatatatctataaatacacatattataaatatacgcacatgaacacacaaatcctgcctgttcctgtactatacctctccttgcatacctatagattagtacatacctgtaaataaagacaaagaaaaattatatatatatatataaaatcagatatatataaaagtacaaatgcatcttttcagggatagctctagtatatttatagtacttatttgaagaggggcatcaacttgcagtctgggctttacctcttaagtacaagaggtgaactaatggaaccaacaagacaaaggtagcattgctgtgaccttcagcctaccttggacttgctgtgatcctgcctagtaaggtagatggtttagggaaatagcttgcagggaggagggcttagtggagaaggtctgtaggggccctgagttgagccttccaaaacattcctacaagccaaacagagagactatctgcccacctccaccagagtaccctgaccaagaaactcagggtacttaggacagaaagaggtaaaaacccaggctgggtggcttggtttggggaagtggggaggtaaccagggttgggttgttttgttttgttcttatattgtcccagcatgcaagtagaaaatatgactacaaaccaaattagtgctttttctaggacagcaagactatataaactgaacctgtatttttccagcgcatgtcccattatcatcaaaagaagaggggtaagtttagctgtgattgtcatgtagatatattttgatgctaagggctgccaagagagcctagatgtgcaataagaagtcatccagtaaaggtgcttagtgggccttgccacctaatgggatgtaagggcatagttctttaaaacgttttccagtgtagtcataaagggctttagtgtctgaagaaatcattattcccaatagcactaacttaactctgatcagcactgcttgggttgaggcaacttagcgatgcttggaaaggcatttgcacactcagtgcaccccaggaaggtttctgagtgccaggtcgagtggtaccaggaccaggctttggttaaagttcttgtaacatctatgtctcttcttccatcaagaccttatctgggattctgtctaagttttagagtacacggtatttgacagcttccttatactggtttcaagctattcactccaacaatttgatttcttgattttgctcaacattacattgaatgcatgaaattaaaatattccacgcccccaagttctgtatgacaccttgtgtgttttctcagatctatgtcagtcgaaaataaagccagcaagggggaaaaaataggcaaactgaatcaatggaaaactatgtagagcacttttcttttctccaagtcatgctttccttaaaatcagttgaaaaattgaatcaaggatggttcattattctgtacccatcctacgtctaagttggtacatatggcatatgggaaatttcaccatatgtgttcctatctccaatctattctgtcattgacgcctgctatgattttgttgtgagcacatacctcttaacataagaggacaggatgcagaactcacagcagaataagaggaaaggtaacctgacagccccagatcaagctcagtattccttccagaaaacctcagctcaccccacagagcatggcaataacaggaaatgcccatcattcctcttcacccagaagtaaaaagcacttcaaacccgaggccccctgggaaaacaagaaatcaagatggctgccagtcggaggctggctttcaagtctctccaactcggcagattggggtcttcagatgtgggacaatgccttccaagacattgaaacaccatccaatagaggcgctgagtggaacctgccacctaatgggaatgaatctcattcatcaaggtcaggactttgtactggggcaagaatttgtcctgcttccttagagagtgaaagaatgaggaagtgaactttacgtttaaaaactccagttgttttccctgtgtatttcttgaagggcaaccaagttggttattgtgtgaattttatattattgactggtgcgttgtttgaaataaggtttaaataggtgactgactcaactgcaaacagaccatgtaaaacagaagttgaaggagacctgatgccgccctcttcttattcctgatcctccctctgcctcctcactccctcccatttattcccagcttacagtgaaggctgatcaaagcagctatggtgccctttgcttgtctcggagctccacttcacaggaagtgttgtggtctttcatgtgaagttgcatttgagaagacaaaatttccaagccccgttcccacatcagtcatgtgcactgagcctgacctacaacagcactgctccctcactggatgggacacaagtgattccacagcctgcccttgctttcccttcatttctgtgtctgtaagtggttatgtgttgagccagggtaaattcagagagatgtgtacagagttcaacaatgggtctttaaaccattcaaatcattggcataattataagaactttccacaccgtggtttccaaaacaggtcatctctaactcgtttcctgcatgcctgtgtatatacatatataaatatatacatatatatatatatacatatatatatatatatatatatctttataccagatctatatgtacacatataatatgacttacatcatcaccctctgaccctatcacattcaggattctaaagcagggagcatcaagtttgccaaagtcaaggaaaaggaaagtcatgcacacaaaccaaagggaacatttcttcctgatttcataaggttgtttgttccatgcacatatatttacaaatatacacatatgtacccatattttcccaccctaagaatatcaatttatagccttaaggaaatcggtcagccatatccctaatgctgatatagaggcaaagaatacacaacagaaaatacaaagcaaaaatttagactgcagatactctctttgcttctctggagcagggtataaaagatatcaacaattcaagagccaacattgtactaatcaatctaaaataaatgagttgcacgcaaatgatttcatttattcacagcaaaccgagcaggtcttgcttgctgtcaccgcctaccctcccccatacttccaaggcagcagagcagcttggctcaaactgacaattcccaaatagaaactcctaaattgcatctgagaatgcccatgccaactccagctgccctctgcacctgaccagatcctgatgaactgaagctgaagatcagatggtgtttatgcagcttcccaggacctaaactgagtcaggcagtgacagagcaatgatatatgcagggactaagggatagggttgtttataccctcggcagatgcagcagaatgtcctaaagccttgcccagaagattataaaaagaggcggagactgttttatattcaggaaaaatgctttgtaaggcttctaacaggtgtcacctgacaagggccatcataatttattttatagggaagacatgaatcaggtggtttggagccctttcagcaaaacgcagctgcctcgctgattagacatttgacaatgttaatgtacatccattcctgggcagggagagagttggcaaactccccaccactgcacatagcttttaaaggcctctggaacagtgagagaagagatgagctacaaagggagcccacccccagaccactttaacaaaaagttgaccaaagaaaagacacctggtagagtggctggccagatagagctgaagaagatggaagttgcattaaatgctctgcagaaattactgcgttggactatctaacatgggtctgatggcaggcatttcagaacatggcagtgtgctttcctccccacatctaccaaacacacacccacacccccacacacacgcgagattatgtggatgctatgcctccttgcacctggacagattgtttttctggtaagtaggtggccctattataggtggcagctgtgttccagaagaaacaaagtgaagctgttctcagggtgatttctggagaaaactactgtctcctgaaagcatgcatagaagtcagtgctcactcttgctaagccacatattccttaacgatccggcttaatatttttaaaagatacctcctcaacccctatacctgtctcaacaatactgtcttcaattattaggtaaggccttgtcattaagagaggggtaggagaaaaaatagaataataaggaaagggaagaaaggagatattaatttcctaggattccaagaaaacaagtgtcacgtggaaatatatccctatgtagtttaaaacagtaacaaatatcaggctatgtttagccaattacaagagcccatatacagttttagatttttttaaaaaataatctcaggaagaccttgggtaagaaaagtaaccctgccctattccaccttctatttactgttagctccctgactctgcctctgcctctgtctttgcgtttcatttttaatctcagagcttcatattttttaaatatatagcaaacaagaaaagcaataagggaactactcacagccagctcaactctattacttatgattacaccatggcaatattcctttttcaccaggagctttggacctgcgcaggttgtggcatgtaatcacccggagcatgtagtcgtctgtagaaatcacaggcacactcatgtttgctctggaaggaatctgttttccacaatgactccccccagctaatgtacacactggcattttgcatgccttcctcacacatggggcaccagccttgctcagaaccacccaaactccacagaggcccttaatatggctagggacagatttcttaagaaagagtaagaagcagctacaaaggacaagcaaatccacaagtcaggcagcattcgagaggcaaaaatgaccctgcaattacgacaggctaggcaactgttttcaaattagcgtacgaacagtgagggactgtgtagagcaccatattatctaagccaaagcacttctaccagatcattcattgacagactggaaaacctaataaaatctttaaaaacagacaaatatctaagtctgaaagaatgccatggagtttgcctaggcttccaccaaagatttaattccattaagagggtttgtctagcctatcacgctaatccaaaggacagtcctcttacgggggagatcccagcatagatgctggtgtgacccagctcaatgattaacaaccatcagcatcaagaaaagcctccctccaagttaacccaaacccatccacttaatgacttaactttttttttttttttttttttttttggcaaaaagtaactgcatctgggcactcttcactctttgccccatagttggaagttaccgctatgtgactctttacctattttcaattaaaattatctttagatttttatttgagtctttaaccctcttaataatttttatagttcctctctactaagcctttttaagttctttatattgttcttaaatgatggaaccttatgactaatgataatcactgtctgaacagtgttgaactatactgggtgcagcatgaccatgaagctctggtgaagtcaaggtcacaaactgcttttaaggtcattaggtcataatctcagactcacaaagaactcaaaattggggagacaccactttagattactccaaaactctgggcctgtacttacccactaatttatcaagaggaatcaatatttttattttaaatatgaaactgggataaatgattggatctccacttattaaccagtactgcagtgtgtttatatccttttgtgtggtaggttggataggatttgtaaagctactgattgatctcatgggccagggttcaccaaaaggatgggaatttgtttctgcattcttacatattgggttgcatattccttcataatggatccataagtaactaaggccttggagactaacagttctccaaaatactcagctaaccaaaagaaaatactaatttttaaaatcatgtcataaaaaacagaaaagtaaaaaaagtctgaaatcctgaataaaattattttaaggatgaaattacatgcataaattaagggtagataacttcttgccatttaattaaacaaatccccaattcttatcagaataaaactgaaggacaatggatgccttttgggttttttaattttttaatattgcactttatagtacttcataagagacaactgtcttaattaaagccataaaataccaataatacatatattcagggcttctgaatatagtcaatcaataagcagtccatgagtcattcctgttttgtattgtttattgtaaattggagtttatctgttctattttttattaactacaattattgttctaggcaatcctaatctacttatacattttagatgtgtgctttaataaaactgtttgaaaatcaaagaaattattcatttcacaaaagcagtcttcgttttcaaaatagcttattacagtttctttagcaagttctaatactacatggaaattattttaaaattgtagatttttttcaggaatccattttgttatataaagcaaagttcacccatatggaaaatgaaatagataattagcaaacatatacctgggaaatgtaggatgtgtttgagcttttatataaatataggatgggtctaagaagttcccttataaaaatgggaaatagaggtatacaatttatcaataattccttatgcctaaattactaaccttccttgggaggacatgtaaagcagcagatttcataatgctttggtggttattttcctcctctccgctaaaatacacaatttctaacctagtatggtacactgtttacacacacatatataaagatgtccccacaactaaaaactttaatgtttcaacttcatcacaaatttttatataattttttttttaacagacagggtcttgctctgtcacccaggctagagtgcagtggtgcaatcatagctcagtgtagcctcaaacacctggactcaagcgatcctcccacttcagcctcttgagtagctgggacctcaggcacatgccaccatgcctggctaattttgttgttgttgttaagagatggagtctcactatgttacccaggctggtctcaaactcctgggctcaagagatcctcctgctttggcctcccaaagtgctgggattaaaggaatgagccaccatacccagcccttttatgtaatttgagtaaaagtaattactaaaaagcacttaatagtctagaaatccaccagaactgggtacctaaattgtccatatagagtaaacatgggtactaaactggacaaccccatcaattttatgcttaagtggccaaattgccctaaagaaagggtatctgaaccaagggccagtgatattcctctgttagaggctgttttgtggtctgaagagtttctctaaagggctgagactctattcggaagagggagcctcagttactgaattgcgctattgaaccctgaacacaaagtacacatatataccctgcatctagccttgatatttcttctgctcaagtcaaaaaactccggaagcaacagcttccaccatcaagcaatccacatacttaaaaagccatcaaagctaagaatagcaaaagctaccttcctgattcagtgaagttgctgctagcactaaaagcaagagaaattatacttttgttcttcagatacggttaaaacaaagaaaatgttgtcaacgttgacgccaacatagacatttgctctataacatataaactgtcttttagacaggttatgttaaaaatatcagaatgccatttttgtaaaggatcttttttaggatagacgtggtctcatgcttcctttgttcgcctccgttttaaaggagcattgtaacccctatcctcatccctacaaaaatccagtggatgcacttccaaattacttctgtcattttgtatgtgttgtgtttattatgcgtaattttcactggatgatgagatacatggtgatactatgtcagtttattctctgtgaatatgtctgtacatagacaggaagctctacttatttgtacataggctgtctgaagtatgtacttctgtcacatggacttcattctgataaagggtgtttcttcttgtttcactgtccatacctttgtgcttctactactgataatcaattcatagaatatcactttatgtaactaagtctcctcagtgtgaaaaataatagtaataaaattattgactcaaagaagtaaaaaaaaaaaaaaaaaa

SEQ ID NO: 338 - DNA, 3899 bp, Artificial Sequence
  GNG2
agtgtgccaggaagggggccgactgagcagtgtgtggaagctgtcgtggaggtgaccgtggggggatgagaaaaggggaaggaaggaacagacagcaccagagggacttgaacaaagggagaagggggattaaagtcaaatcactgtcagcagcccaggagcagacaaaaccaccagagtaagccctgaaatggaaatgagagggaaaagaagcaagccgctaacagctaccaagaagaggaggaagtgggagatgcgctgcttcctgtagaaagaacgttgattgaagacaaagctgggtggggactagtccctgggctgcagccgctgctacacatactcacaacgctgccgccgcgctccgtgggcaactcctactactgctgggctgggctgggctgggctgggctgcgccggagctcgcctgcacagatcagctccggagaggggaaaaccacgctcctcggaccaagcctcgggagctaagatctgccagtgagcctcaggctttaggaactgaagagtgtttctgaaagatctatccagcactccgatggccagcaacaacaccgccagcatagcacaagccaggaagctggtagagcagcttaagatggaagccaatatcgacaggataaaggtgtccaaggcagctgcagatttgatggcctactgtgaagcacatgccaaggaagaccccctcctgacccctgttccggcttcagaaaacccgtttagggagaagaagtttttctgtgccatcctttaagtctttgagaggggcctgaagagcctccgggctcctgggacattgatgtagagtttttagtgaagtgggcacctttctagtccacggcatttgaagagagcgaggagaaccattctggaaactctaggctatgcatgtttaaagatctggtcccctttatgagaatgcaagccgatccacatcctgacttaagagatctgattctgacgaactgcctggaggaggggaatatataaaaataaaattggtgtcacttcttttctgctatcccccagccccccccccaaaatcctcatgtttctgcttcatattttgaaaaataacaattaaaacagacagctgtactgaggtaagatatgtgtgaccttcttggaatgaatattgtctttagaataccctttgataagctgagctgtcccgtgtagatgcaattcggtttaatggcattgatgtatagtcactgtgcctttctttttctttcttccttctcctctacccctccttccacccctccccattagagtagtgtggagataaggctggactggtctatcagattgaactccaagaatgatcacacaaaatgtttagggagatgttccccgtggtgtatcctcatggtaacaacgacaaaaaatgccggttgtctgtgttctcttttcactattcctaacatgtgtacatgatagctttgattctgcaagtaaaagtaaatcctgtgttgtgactggtgctttcatatatttgtgacaatttttgagtaatattgcatgaaaatgtccctatgttacatccattcagaagttttgttgttttactctaaagctgggaaaggaaatgagagggaaaagaccccggagagggaagaaaatctcagtattttgaaaattgagattacttcagagccttagccacacctaaaatacctcctagttaatagtggtataaatgcctcttcaatacgttttccagaatccaaagcattttggtttatccaggacccagggcagcacagctgtcaccaagcaggagagttaaggattcaccatgagctgggaaatgcttttgccatgagtatgagcaaattccctctttccctgaatcatggacattctagattaaaagaacatttttttgtgctcttaacaagaaaaccatggccctcctttgttcaagtatcagaagaaataaacccacagctccagagaaggtgaccattctcagaactccagctattcactctccagggagaaggacctcaaatcgccactctttgggcggcaggtgcggtccccacggccggctctacgaggaagagttctggctcttttgtccactgagatggtcttggtttttcacttaacaaattttttaatggaatctttgtttttgttctccatcttgtttgttagagtctctcggcctttatttacaaattccttgcaactagagcgctccttccccaagatatggtagtgagagtaatttttcattgtagctgtagtctccatcagtaacagcaggccctggaagacttgatcacctttttctgtgtcattttcagtcaaagagggcctctcttacatcttgtttgctttcaaatccccaaatatcatctccatctcccaattaattttattgtctctttcctctctattcgctttctcctgttttttttttaaaaaaaaagcatgaaaaaggaagagaaaaagtttgatatgccaaggacagattttgaaacagacttggtaaatgttttccttagctccttcatgggcatgctggtgaaagaataaatacatccaattaaagctcatgctggggtcggggagaagaggatactgaaacatttgtgaaatgtatgaatgcacttctgtaaccagatacttctgttcttctgttcaaattgtggggtttttgttacagttaggacgcccatgaagatttaggggtgaaaaaaacagcagagtatttattaaactacagcattgtacaattagcttagtaacactatggaataagctaaaacatatcacagtttttacatgggccaaaacatgaattgagtatgtggtcacatgaaaacacggatgaatgaataaaacactctttggtggtgactgaggcatcattagaaggcccagacgatttccactattcacagcatttccttttctcagaaggactctttatatttccatgtaaatctagatctttggagcaattaagatggaattacaatttctagggagcattttaaggaaaatgttttggctttttcataattttatgtcttacagtatggaattataatacgaaaatctttatatgagttttggcttcttggtatttgtacttattcaggggaaaaagtctttcgattacttatgcctctatagagcttaatttcttgagaaattcaacagtcattttcaccagcataattttatcttaaggaataactaataggaaaagtcagcttaattatttaaggccctagtttctacatataatatattcgatagaaatgaaaatctgccgtggaattaactaataagtagtaacaataaacttcatatttagaatgcaaagtctataaagaataattttacatgatcctcaatatcaactccagtttaaaaagtgttatttttaaaacatttgaaaccaagtactgtttaatttcaatcagaagatgcaaatacatactttgatctatgtttgattttgctaataatatttgaaggagattgcctaccaaggacaaaacaataaatttaaaaatcaaacgatttctccatacgctcatagtcacatatggaattttgagaaaataaagcatgctgtctttaggaatttttatacttctttgtctttcttccttaatatttgcttctagctgctcttggcaatgatgaattgttatgtatgcattaatgttttgcagcccaaaagttgttcacatttttcctatataagatctgtggagtgtgtgtttcaaagagagaactacagaaatgttaaagcaggaaaacctgaatgtgatgtgcacattttcatcccacatggacaatgtatgtgttttaataaatggaattttcagattcatttcaaaaaaaaaaaaaaaaaa

SEQ ID NO: 339 - DNA, 8703 bp, Artificial Sequence
  GFPT1
ggttgctggcggagcccgggaggcggagaaggctgtcgttgccttggccgtcgcatccccgagggagtcgtgtcggcgccaccccggcccccgagcccgcagattgcccaccgaagctcgtgtgtgcacccccgatcccgccagccactcgcccctggcctcgcgggccgtgtctccggcatcatgtgtggtatatttgcttacttaaactaccatgttcctcgaacgagacgagaaatcctggagaccctaatcaaaggccttcagagactggagtacagaggatatgattctgctggtgtgggatttgatggaggcaatgataaagattgggaagccaatgcctgcaaaatccagcttattaagaagaaaggaaaagttaaggcactggatgaagaagttcacaagcaacaagatatggatttggatatagaatttgatgtacaccttggaatagctcatacccgttgggcaacacatggagaacccagtcctgtcaatagccacccccagcgctctgataaaaataatgaatttatcgttattcacaatggaatcatcaccaactacaaagacttgaaaaagtttttggaaagcaaaggctatgacttcgaatctgaaacagacacagagacaattgccaagctcgttaagtatatgtatgacaatcgggaaagtcaagataccagctttactaccttggtggagagagttatccaacaattggaaggtgcttttgcacttgtgtttaaaagtgttcattttcccgggcaagcagttggcacaaggcgaggtagccctctgttgattggtgtacggagtgaacataaactttctactgatcacattcctatactctacagaacagctaggactcagattggatcaaaattcacacggtggggatcacagggagaaagaggcaaagacaagaaaggaagctgcaatctctctcgtgtggacagcacaacctgccttttcccggtggaagaaaaagcagtggagtattactttgcttctgatgcaagtgctgtcatagaacacaccaatcgcgtcatctttctggaagatgatgatgttgcagcagtagtggatggacgtctttctatccatcgaattaaacgaactgcaggagatcaccccggacgagctgtgcaaacactccagatggaactccagcagatcatgaagggcaacttcagttcatttatgcagaaggaaatatttgagcagccagagtctgtcgtgaacacaatgagaggaagagtcaactttgatgactatactgtgaatttgggtggtttgaaggatcacataaaggagatccagagatgccggcgtttgattcttattgcttgtggaacaagttaccatgctggtgtagcaacacgtcaagttcttgaggagctgactgagttgcctgtgatggtggaactagcaagtgacttcctggacagaaacacaccagtctttcgagatgatgtttgctttttccttagtcaatcaggtgagacagcagatactttgatgggtcttcgttactgtaaggagagaggagctttaactgtggggatcacaaacacagttggcagttccatatcacgggagacagattgtggagttcatattaatgctggtcctgagattggtgtggccagtacaaaggcttataccagccagtttgtatcccttgtgatgtttgcccttatgatgtgtgatgatcggatctccatgcaagaaagacgcaaagagatcatgcttggattgaaacggctgcctgatttgattaaggaagtactgagcatggatgacgaaattcagaaactagcaacagaactttatcatcagaagtcagttctgataatgggacgaggctatcattatgctacttgtcttgaaggggcactgaaaatcaaagaaattacttatatgcactctgaaggcatccttgctggtgaattgaaacatggccctctggctttggtggataaattgatgcctgtgatcatgatcatcatgagagatcacacttatgccaagtgtcagaatgctcttcagcaagtggttgctcggcaggggcggcctgtggtaatttgtgataaggaggatactgagaccattaagaacacaaaaagaacgatcaaggtgccccactcagtggactgcttgcagggcattctcagcgtgatccctttacagttgctggctttccaccttgctgtgctgagaggctatgatgttgatttcccacggaatcttgccaaatctgtgactgtagagtgaggaatatctatacaaaatgtacgaaactgtatgattaagcaacacaagacaccttttgtatttaaaaccttgatttaaaatatcaccccttgaagcctttttttagtaaatccttatttatatatcagttataattattccactcaatatgtgatttttgtgaagttacctcttacattttcccagtaatttgtggaggactttgaataatggaatctatattggaatctgtatcagaaagattctagctattattttctttaaagaatgctgggtgttgcatttctggaccctccacttcaatctgagaagacaatatgtttctaaaaattggtacttgtttcaccatacttcattcagaccagtgaaagagtagtgcatttaattggagtatctaaagccagtggcagtgtatgctcatacttggacagttagggaagggtttgccaagttttaagagaagatgtgatttattttgaaatttgtttctgttttgtttttaaatcaaactgtaaaacttaaaactgaaaaattttattggtaggatttatatctaagtttggttagccttagtttctcagacttgttgtctattatctgtaggtggaagaaatttaggaagcgaaatattacagtagtgcattggtgggtctcaatccttaacatatttgcacaattttatagcacaaactttaaattcaagctgctttggacaactgacaatatgattttaaatttgaagatgggatgtgtacatgttgggtatcctactactttgtgttttcatctcctaaaagtggtttttatttccttgtatctgtagtcttttattttttaaatgactgctgaatgacatattttatcttgttctttaaaatcacaacacagagctgctattaaattaatattgatatattcagtattctcttcaactttgtcacgaggaagaatttcctgtagttaattttaactttccttcattacattgttgcataaaactagtcccttagtgccagtttggaagttacttgcaattgtttggaagatttgcaggtcgctgacctcatcatttcactctaagtatatgtggtaggctaagctcagaaaaaggtatgtatgctttacactgataggcaccaaatttagtattgtatcctaagtatttttcctcttctgtattttctgtgctctacccctgaaatatatttaggaataaagaagatataaataaagtgatattggggtatgttcagcttgtaagtgtcagaaatggaagttgacaatttggattaaaatatttaaagtagaatgttattatttgatacccccaaaattgtgagtaataatttcttaatggagcttttctggccagatcttcagggctataggagagtgtgtttgtttttggtgaagtccttctttttcaaaggtttttacttttaaattgtgaagataagctatttagcacaattatttaagtaagctgttttttcctttcttttctttcttttcttgttttaacttctgggtgaggttaagattttctaatagttattgttgttgccagagaagcatagaattctgcttgtgtcttagggttagagaaagatttgttatattttgaggtaatttggaaggactttcatacatggtgactagaaacctgatctttttaagaataaaatagggtcactatttacattatatataatatatggctattatagctatattaatctactttaattgtttctaagattattttgtgtaagtcagctagcgtgtgtatagtgtcatttcttatgttttgtatattaacgttttacaaacacaatttgtgtgggtttgtagcatttcttatagtttaaagtatgattcagcattctaagttaaaactaatatgtgaagtcagtcattagtctgcataatctctgtctccctctgtgtgtgtctttctataaagcacatgtgtacacacacacacacaaatatactgaaagctagggtaagttctaaactgaatatcaaaaaccaaaatcaagaacaaagaagtgatattttccaaacaaacatggattctctgccgggtgcagtggctcagcctgtaataccagcctccactttgggagtctgaggtgggagtattgcttgagctcaagagttggagaacagcctgggcaacatggtgagacctggtctttacaaaaatttttttggccggacgcagtggctcacacctgtaatcccagcactttgggaggccgaggcaggttgatcatgaggtcaagagatcgagaccatcctggccaacatggtgaaaccccgtctttactaaaaatacaaaaattagctgggagtggtggcgtgcgcctgtagtcccaactacttgggaggctgaggcaggagaatcgcttgaacccaggaggcggaggttgcagtgaggcgagatcacgccactacactccagcctggcgacagagcaagactctctcaaaaaaaaaaaaaaaaaattttttttttaaatgggctgggcatggtggcttgtgcctgtagtctcagcaacttgggaggcttaagtagtaggatcgcttgagcctgggaggttgaggctgcagtgagctgtgattgtgccactgtgcttcagcttgagtgacagagtgagaccctcctgactcaaaacaaaaaacatggtttctcctctctctcctgtcttcttactctctatcccatttgatgtagtgatttttaaatgcttttgtaagttaattcttaacacaaaagagacattgtaatgaggcacaccactaaagtgagcatgcccaattaaaaccagtgtaatataggataagaaaatctgatttttcaaaaaagatactctacataaagaatccttcatataaaaagttctttcttgtagtacatttaaagttttaattcactcatgtataactgagagttcctttgagccctttttaggcagggaggcatgtctgtcatctagcgtgtggcccagtaagtgattattacattggaatcagtttttcagtcttttaaaataaattctgtgccataagaataaaagataaagagaaaaattaatgttaactatttttagcttattataactatgtcaacaagtgtttattaatacctattatgggaaagtcactgtggttggcattgaaaattacatcatctttaaagcagtatttgtccccagatggactcatcactagcaaagactaggttcattggaaggcatagggtgagagaatgggaagatgaagtggaggcgggttgttaaagtgctgtcagtgagtgattttgtctacttgaataatggtccatgtttgggggcatattgtgtttcataagaagtgaaaggtatttgcaaagtaagctacaaatgacccataaatctgttaacaacagtccttaatatgcaaagatgaaaaacaagcattactgctacccaaagggaactggtgcttggtgatgtgcagatggggctgttggttaagagagctattacaggttttctctcttaggtttcataggaggtagttactgagatgagattgttttatctttttgaatacagatctcttgtcttgagttagttctgaggatgggagtaataaaggagttttttgtttttttgtttgtttgtttgttttggctccttagtaatactcctctgacatttatttctattattcttcaaagaaaggaaaccaactgaaatgtttgctttaacaaacattttaataagttctctgggtttttttttccccttttaaaaaaattagcatataccatagcaataaaagaactaatgttaactattgtatgctacaacttaagtgatttttctaaagaagcacaatgtcattgaaagtattattgaaaaggatcatagtcacattgaatttgtgaaggccaaagaaattgaagggagtgatattttcattttatgatattcacatatttagtaaattttgtgtacaagaataccaggcagagtgttttacccatggaaacaggtttcagattactttatttttactgttagagtctcaagtttagaaatgctaacacttaaatcagtttttttctcactatacttgaagattgttaatattttgatatcttcctagcttgatgaatttaaacatatcttcagatctgtgacagtgacagccaataggactgataatattagcttcaaaccaataatatccagggttaaaataaaaatcatagtgaaagtacgattgtaaaattatgctatattaacttttaagtctgtaataacttgacatcaaaatgttatgtaattaccataaataatggctagcgagaacatctttggaaattctcaaattacctttcttactacactgtttgcagaatgaatgtagaaatgatcctgttagctttctgaatgttctgtggttgaatgtgtttttgcttaaataaagcttttggtatttgtttaaattacacttcttgagaagtggaaattttaggatcatctttgctttgtttcagttttgtgatttttgaaatgaatgtttagtttactgagccagttggtcatttcttcctcatgtcgttaagtccagtgagtaagcctgaactgtgaataaattaccaaaaacttgcttagaatttcattttgaagcaatttgctaatatttgaagtgtatacacatttgtagttatgttagaaattgtattgtactaagaatgtaatcaatgtctactttagttgtaaacatttctgatgtcaaaactttattcattactgttgattttaagaataagaaatcactgcctaaatattaccaaaagccactgtctctacccgaacttcccagtttgggaaagaatcgttagataaaacaaaggctctgccctttctgataccaaactccacagatactttctcacatcttttaaaacattttgcaataacatattgtttataggaagtttacggggtatgcaatgattaaaacttttaagtgaattgatagttgcaaaagaaaggataatatttaaggtcagtgagtagcaagacaatctaaagtttctgtaatatctggctctctgttaattatagagcaaagtttcccttacagaatccttttatgaacagcaagctagagtctatccctagtggttatagcacctgctgcgtttttcaggagacagttaggccagggtgatttgaatggatagatgtgctgttttgcctgcttgtagaattcagcccagtctttggtctctctctctctctccctcctccacctctccctctctcttcttctgcaccagagcctaaggctgcgccaccaagatgcgtcattttttccagaggcttcttttttttttttttgagatggagttttgctctgttgcccaggctggcatgcagtgctgcaatcttggctgactgcaacttccacctcccgtgttcacacgagtcttttgcctcagcctctggattagctgggattacaggcacgtgccaccatgcctagctaatttttgtgtttttagtagagacggggtttcaccatgttggccaggctagtctcaaactcctgaccttaagtgatctgcccgccttggcctcccaaagtgctgggattacaggcatgagtcaccgtgtcctgcccagacatatcaaatttgacaggtattgtataccctttggatctttaggaattaatttttgcctctgtcactcagctttgtatattttgaaatggagataagtatagggaggtcttggaaggaaaattgccagaattcccaaaccatgtaacactcattgagaattccagatccattatatctaaagggcaagtgaaggaaacagtattgtgaactgggtataactccttggttcttaactagtacattcttaatctgtgagacccaaaggttgataaacaataatttaagattgtacagtactctaaacgtctgcaaaggtctagatgttatcagtatcactagtttttatttctgccagtagctcccttttaggttacattgttgtcctctttccagtgtcgcatctgtcattggtttttcactatggcaagttcattaaaaagcttgctccattgttatcttcaagtaatgcccataaggagatggaagatatctgagacaattaaggctttagcttctaggcaagagaaataacgttgcattaaatttcaagtttctttctgctagacttgaatgtgtctagccactctaatttatgggggcttttggttttttcctattgtactttgtatgtagaattgttttgaaatatcaagcatatttactttgaatttgaactctttcttaattttgtatttatcctttgaataaaatgtaaatccaatatttattatt

SEQ ID NO: 340 - DNA, 458 bp, Artificial Sequence
  KRTDAP
gggaccccatttctgtgctcatctgcctccttggcaatataaagagcaagcactgaggccccgcctcagagcaccccaaacttgacgccatgaagatcccggtccttcctgccgtggtgctcctctccctcctggtgctccactctgcccagggagccaccctgggtggtcctgaggaagaaagcaccattgagaattatgcgtcacgacccgaggcgtttaaggctgatgagttcctgaactggcacgccctctttgagtctatcaaaaggaaacttcctttcctcaactgggatgcctttcctaagctgaaaggactgaggagcgcaactcctgatgcccagtgaccatgacctccactggaagagggggctagcgtgagcgctgattctcaacctaccataactctttcctgcctcaggaactccaataaaacattttccatccaacaaaaaaaa

SEQ ID NO: 341 - DNA, 4763 bp, Artificial Sequence
  TRDN
ctctagagtgccaaaaaagaaaaaaaaaagtgctgaagagtcctagggagatgaggctatttttgtttgaagctgatacttctagctgagccacaagtgctgcttggaaagggcttaggttgtttccagggggagaactctgcagaggagaggcaaagttcaacaggacaacaaagaagcagcagaaacagccaggaaaacgaagagcccccaggttttgacacagaaccctccaccagagttctcaaatccccaaatactctgcaaagtgcaacttgacgggaacttttcaactgacttttacttttgacgaccaccatgactgagatcactgctgaaggaaatgcatctacaaccacaactgtgatagacagcaaaaatggatctgtgcccaaatcccccggaaaagtgctgaagaggacagtcacagaagacatagtgacgacgttcagctcccctgcagcctggcttctggtcattgccctgataatcacgtggtcagctgttgccatcgttatgtttgatttagtggattacaaaaacttttcagcaagctctattgccaagattggctcagatcctttaaaactggtacgtgatgctatggaggaaaccacggactggatctatggcttcttttctttgttatctgacatcatctcatctgaagatgaagaagatgatgatggtgacgaagatactgataaaggagaaatagatgagcctcccttgagaaaaaaagaaatacacaaagataagactgaaaaacaagagaaacctgaaaggaaaatacaaactaaagttacacacaaagaaaaagaaaaaggaaaagaaaaagtaagagaaaaagaaaaacctgaaaagaaagcaactcacaaggaaaaaattgagaaaaaagaaaaaccagaaacaaagacactggcgaaagaacagaagaaagctaagactgcagaaaagagtgaagaaaagactaaaaaggaagtgaaaggtggaaaacaggagaaagtgaagcaaacagctgcaaaagtaaaagaagtacagaaaacaccatcaaaacccaaagaaaaggaggacaaagagaaagcagctgtgtcaaagcatgaacagaaagatcagtatgcattctgtcgatatatgattgacatatttgtccatggggatttaaaaccaggacaaagcccagccattccacctcccttaccgacagaacaagcttccagacccactccggcatcacctgcccttgaagaaaaagaaggggaaaagaagaaggctgagaagaaagttacttctgaaacaaaaaagaaagcagaaaaagaagatatcaaaaagaaaagtgagaaggaaactgccattgatgtggaaaaaaaagagccgggaaaagcttctgaaaccaaacaagggactgtaaaaattgcagcacaagcagcagctaagaaggatgaaaagaaggaagattccaagaaaacaaaaaaacctgcagaagtagaacaacccaagggaaaaaaacaggaaaagaaagaaaaacatgtggaaccagcaaagtcaccaaagaaagaacactcagttccaagtgacaaacaagtaaaagcaaaaactgaacgagccaaagaggagattggtgcggtttcaattaaaaaagctgtacctggaaagaaggaagagaaaacaaccaagacagtggagcaaggtaaaaaaaaatgaaggaggttgacattatcttctttagaaagacaacaacatgcggaggaaagcactggattcagacaggcggaagacaataacctttaagtctattactctttatcactgtccttgcatgtttttctgtgccagggagaatgtgagacagcaatctgggttggtctttcttttgtgtaactgaactttgaatatcagttccgaacagggaaactccccaaactgtttaattacatcaggggacatgctgaagattgctgggaataagacaatgatccagggtaactggtagacatattcctatttgatttgtggttttaacaccaccttactgattataatttgaaaaataaagatggcccaatcctatacatgcaaaaactatttctgttgcttgaaaaaaaatatgtaaaagttaaaatgaagaaaataacagcaaaaatagagtatattatgatatatactatattatgacttcaaccattctcccaagaggtctgaaatttcagtgttataaatcataatggtataaaatagttaatgcattttatttgtatttatgtagttatatcataaatagatcactccagactctgcttgagaaaaatgctacagtacactaaacttaaaacatttaaagtgatgtggcttctcttagagctcaagtgtgctaataattttaattgtcgttccctcatgtcattgctcttatataataatactatatttattgtaataaattaaattagaacttgcaataattttatcaagaacaaagtctaaatgatttctccttcaaatttgagatgcaattaaatgtatgaaatcctaatatcagaagttaagatcttttgacataaatatatcaagaaaatccttcaatccctcacatgtcaaataagtaaactaaggttaagaattcagttaagtaaaaagattggttaagaatttatttccttgggcttttcaaaataaaatccctttataattgcatggaaaatgttttccaatttattctggcttctggggactctgaaattttacagttcagtagatgtttctgttggtttctttttgaagaagagtggaattttagtttctgaaatataaagtgggagcactggatcctaatttcagtgtgttcatttatgcgtgttcctgagtctaaatttatttttttaaaaaataaaggtaattatccctgatctgcccatctgagaagatgttgtatagggcaaacatgaaaacatatgtgaaaggatatgaaaatgtgtaaacttctagataagcatgtaacagatacttaggcattttttcttataaaatcaatttcaacacagatgacataaattatcaaattactttgatttcattgagttttatagctttccccctctagtataaaagtgctgattactcatgatattcataggttgttttcatagccacagtatatcaaaagaagattgactagatataaaacacccacactaataatagtaccaaacagacaattgatttgaaaacattgtttctttcttctgatcatcacattggtgtcagtttcattaattttataatgtctcctctagtggacaagagactggaaatggttcttagagataggatcttactccttcagatgattttataattttgtttactaaaatcttcttttatcttattaaagcttaggctcttggattgtgtgaaaaaaatgaggttctttcaatggctatttttatattgacttggtaaatcatttcaattttaaatattgtatgacaatggcctcatatttttcaatcataacaatcataggaaataatatatttggatattttgcatatttttatgatagtatatctattactaataactgatacaaaaaatagatattttgtgcttttaataaagtaatatgagaagtaataatgacattctataaattgtcccatattctaatagttatgcataatgctttaagacttgtatactttgctttcttacatagtttttagttatcttcagaagtataaataatctattagtttataattcattgaaatatagttaaattctctttaaatatttattttatttatttgtttaaacatgtggactttatttagaaaaattatatgatttttgttactcttaatagagtttaagtacactttgtgatctgagtataattgtgcatattgaatctctggacttaaatactatggatattccagtatctcaaaattaagttgaaagttttattacagaataatgtagtattcagttctcttaagaattaaaaatcacttcgacagtcagttaagaagaaacacgacaaaaatatttttaggtaattaaataagatttgtctactaaccatcaagaataaattttaacacagttagtaaacattttattaagtataaagttggagcctgttgatcataaatgtatcagagttcactataataaaatattcaactttgccttaaattaaggaatgtttcaaaattcataaatgggctaatttgtgtccacttgaagagtttctttctttgcttttgatgctattctgtaaacaatggttccctacataattgtaatagtgttttacgttgtcacaacaccaggcaaaacccaagtgctattgcaagctttgtaaatctatcactgtcctcatccaccttatcagattcttctcttctttgtgtatgcactggtctttttaaaatctgtgatgtgtactgattgtagatttattccatactttcaagtgaatgctaataatatctaagagtaatgatttccctgagaaaactttatccatttgaatataatgaatgttcatatttcttggtgtaccaaagttataaaaaaagacagaaacaattttacatttaaaatcaatgaagtaaaacagaagatttagttaacacaattgtatttaattatttgcttaatatgtatttttaaaataacttatttgcatatgttgactaagtcatgctgttgaccctcaataaatgttaaattatgataatattataaaaaaaaaa

SEQ ID NO: 342 - DNA, 676 bp, Artificial Sequence
  CLPS
cccatcaccacagctggctctgtctcccgccacccacaccagctgtcccactcaccatggagaagatcctgatcctcctgcttgtcgccctctctgtggcctatgcagctcctggcccccgggggatcattatcaacctggctggagtgtagtggcacaatctcggctcactgcaatctctgcttcccgggttcaaatgattctcctgcctcagcctcccaagaagctgggattacaggagaacggtgagctctgcatgaatagtgcccagtgtaagagcaattgctgccagcattcaagtgcgctgggcctggcccgctgcacatccatggccagcgagaacagcgagtgctctgtcaagacgctctatgggatttactacaagtgtccctgtgagcgtggcctgacctgtgagggagacaagaccatcgtgggctccatcaccaacaccaactttggcatctgccatgacgctggacgctccaagcagtgagactgcccacccactcccacacctagcccagaatgctgtaggccactaggcgcaggggcatctctcccctgctccagcgcatctcccgggctggccacctccttgaccagcatatctgttttctgattgcgctcttcacaattaaaggcctcctgcaaacctttaaaaaaaaaaaaaaaaaaa

SEQ ID NO: 343 - DNA, 11659 bp, Artificial Sequence
  SLC1A2
aggccagagatttattcgagcttcggcgggggagggagcgcagctgggccgcgtttaggctgcaccacccgcgtgtttcagccgctcgactccgctggacctgggacccccagacgtgggaggatgggggtgacctagtgtcttccagtagggcaatctctggacatctttatctccccagtacctctccagatcctgaagcctggggccagggaggagaggttagatgtcagcagtggaaggacagtgccaacaatatgcccaagcaggtggaagtgcgaatgcacgacagtcatcttggctcagaggaacccaagcaccggcacctgggcctgcgcctgtgtgacaagctggggaagaatctgctgctcaccctgacggtgtttggtgtcatcctgggagcagtgtgtggagggcttcttcgcttggcatctcccatccaccctgatgtggttatgttaatagccttcccaggggatatactcatgaggatgctaaaaatgctcattctccctctaatcatctccagcttaatcacagggttgtcaggcctggatgctaaggctagtggccgcttgggcacgagagccatggtgtattacatgtccacgaccatcattgctgcagtactgggggtcattctggtcttggctatccatccaggcaatcccaagctcaagaagcagctggggcctgggaagaagaatgatgaagtgtccagcctggatgccttcctggaccttattcgaaatctcttccctgaaaaccttgtccaagcctgctttcaacagattcaaacagtgacgaagaaagtcctggttgcaccaccgccggacgaggaggccaacgcaaccagcgctgttgtctctctgttgaacgagactgtgactgaggtgccggaggagactaagatggttatcaagaagggcctggagttcaaggatgggatgaacgtcttaggtctgatagggtttttcattgcttttggcatcgctatggggaagatgggagatcaggccaagctgatggtggatttcttcaacattttgaatgagattgtaatgaagttagtgatcatgatcatgtggtactctcccctgggtatcgcctgcctgatctgtggaaagatcattgcaatcaaggacttagaagtggttgctaggcaactggggatgtacatggtaacagtgatcataggcctcatcatccacgggggcatctttctccccttgatttactttgtagtgaccaggaaaaaccccttctccttttttgctggcattttccaagcttggatcactgccctgggcaccgcttccagtgctggaactttgcctgtcacctttcgttgcctggaagaaaatctggggattgataagcgtgtgactagattcgtccttcctgttggagcaaccattaacatggatggtacagccctttatgaagcggtagccgccatctttatagcccaaatgaatggtgttgtcctggatggaggacagattgtgactgtaagcctcacagccaccctggcaagcgtcggcgcggccagtatccccagtgccgggctggtcaccatgctcctcattctgacagccgtgggcctgccaacagaggacatcagcctgctggtggctgtggactggctgctggacaggatgagaacttcagtcaatgttgtgggtgactcttttggggctgggatagtctatcacctctccaagtctgagctggataccattgactcccagcatcgagtgcatgaagatattgaaatgaccaagactcaatccatttatgatgacatgaagaaccacagggaaagcaactctaatcaatgtgtctatgctgcacacaactctgtcatagtagatgaatgcaaggtaactctggcagccaatggaaagtcagccgactgcagtgttgaggaagaaccttggaaacgtgagaaataaggatatgagtctcagcaaattcttgaataaactccccagcgtatcctatggtaactgatgatataaacaagctttctttaaaaaggaaaaaaatgcgtatatttctatgtttacttaatctgttagccgaggcttagaggagctcttgtgagtcagtgatgacaggcacggtgctgtgtctttgccaaataatgctttataaccgtctaattttctcacttgtattattatttgaatggatgctgctggaggaatcagttggaattgaagacacgttcttgccagcttcccttttctcccaagatgcagaaatgtggatgctcttttcccaggggacatgagtaaagcagtgtggtacactccagggacttgggaaaatgagcaaacacacagcgtgttattccttaaagtgttctccatgtctcgccttgttatgcacaagagattctattaaaagcctctagaagtaactccccttaaaatgtctagtaaagcttgcacatggattgattaaaagcaaatacctgtcttagggaattctgacaatttatcttccatatgctctttaagtaaaatgtttcaaagacagttttaaagggagccatgctcttaaaggcagttgattaaagaacctgttacatctctgccttaccctgtgtaatctgtgagaacaatggttgaaatttcaaagtatgtttcattattctttctaaatttgataattgattaggaagtattttatatataaccactgtagatattgacaaaagtaagagagcacagtcaacataaagtttaaccagagttaaatattcaaatttatttatgttcggtttgccttcacctggtgtagtaaaatcaaatgagattatttggtatgtgttttgctttgtttaacccaaaagattattttttggttcctaaagaaaaagatatttttaatctgtcaattatttcagtcatcatctcatcgtcctagaaagcctggtcattttactgtcctcacacatggaagacacttgtgttggctgtgcctcttttaatgtcatctcttgatgaaacaaaaatactggtatttatccaatatgttgaaagcgttttgttatcttctatcaaagcacataaaaccagttataggacacagttggaagcagagccagtcttcctcctcagtcttctcagtagaaaggaacagaaaacaaacatctgtgcaaaaccctataaaagtgatattcctatggcagagtccaggcagccttgaacaatgacatggcaacaaaggatggctctgtacaacttcacagatggaatcttgtttaaggctgtgaagttttaaggaataaataatataattggtgtagcacagtgccttgcatgcagtaggcagccaacaaatccttaatgattggtaatgcaagctaaaatttttaatgtctctactatccttttttattgaataacgcacagtattttcctaaggttgctgggtttgggagtaagcttgggacttgaatcattgagaaataaagcacatttgactctaagaagtatgtagaaccttgtttataggtgagaataggctgtattatatgaaaccagcggagggatgctgagacagtcatggtttatagaatccaaattctctgagatgagggtgcttatggacctcaaatagcctttcttatctgctccttgtgacttctctcttttaaatcagatacctttgaaacatacaagagacatgagattccagttgtttttgtctcctaaaccctagtgatttttggataaggatcactactgaacagtattaggcaacttttcatttttgcttttcaaatgacattggtctttatttccagtagatgggcagtaaacagggtcagggtggtcaagggatatgattaagtgtagtagtagaaaatgcattctttttttttttttttttttagacagagtcttgctctgttgctcaggctggagtacagtggcacgatctcagctcactgcactgcaatgtccacctctctagttcaagcgattctcctgtctcagcctcccgagtagctgggactacaggcacatgccaccatgcctggctaattttttgtatttttagtacagatgggtttcattatgttagccaggatggtctcgatctcctgacctcatgatccacccgccatggcctcccaaagtgctgggattacaggcgtgagccaccgtgcccggccagaaaatacattctttacagcaaatgttataggttaaggagacagttcctgggtttagctgtgaaactgtttaggattttctttaagtggtgttcccaagagcttttttctggtaagttggaggctataggcaaagcgtctaggagcttgttgttttttgctatggaaggccagctttgggatctatatacatgggcatgtttctcaatggagtggtcacaggattctcttctcagaactctgcctgaaacctttccggtgtgttttgtcttcaactttttcctagctatcctattagcctgtaaatatgtcagcagacaatgtgtttggaagaaacaaggtgtacaacttcacaaagcaagttttttctggtctgagacttactgtgtgcaggaagtctcgtgagaatatacttagaaaatcacacttatctggaaattcaataagtcatattaaaaatatacaatttcttgaactcaggactagcctgaaaatccaaaatgcatgtagagttgacatgttgacatatgtctatgtcctctgtttttatttaagcctcatttatttctcccttgccatgcccatttgggattttctttgcccagcatatgtgccataaacagaacaaatggatccagggtatacctctaataacctttatctaaatagaatacatttaacctgtcaattatatgtatagatttatcctaattggttcaacatatatatgaatgcttgtaatagtctgttactatttgataatgcataaatgttatatttatatacagttacagcaggccagaaacatacatacactgcatcctgtaaggtctgtaaatcagggcttcggcaatgccattttgctatagactcattcatgttttttaggaatcagaatcatttcaggagaaaaccaactaagtagactttaattcttctctttctcattcttgccctttgagaaacccaagtggaatcatcacttaattacttactcaaattcaatgaatcaaatccaatccaatcagtgagaagaatagcttatctttcaaggtaatactttaccttagatctttgagggcatgcttcccatacaaagagcatcagaaaatcagggcaatcatctagatctcacagatcttcaacataggactctaggttatgagagctgaaccacatagctatcagtttcagtttttacttcctattgagtgtgtagaaacacagcctatggttttgctgtctgcggaagttaccataccctgtaaaagacaaatatttctttctcctctcgaaccactagtcagcctggatattcatgaaagctgaaagaaggggtgccaaaatgcctagctcctggatttagactcatggaatatgagaaaggcttagggaaaattcaagtcatggggagattcctgctaggtgatgccaggaatctcaatgacctgttgattagagggtctctggtcatttccacttgtgtgtggagaaatacatcatttgcatatgtatctagtcaagaagcccttttggagcaaagtggttgggaaactcatttactgggtccaccaaaggaaacccaattctgccatgtttttgcaaatactacacgtccctttgctctcaatagcaaaagtgatgttatagttttttttacttttgtcagaatcaaggcttcggccacctgtgcaatattttcccatggaatgcagcagtaaatccaagtaggtatatccgtgctcagagagaattctccatagttctgactcctgaaaaacaagtctcattagctctcatctagtttgatgactaaaagtgcacagcagttataccccagtggaagtgatttttctcacctagctgctctctaactcttacggctatctagttgtctgagctgctggtttgttttacttattctccaactgaactcattccaaaccaagaaaaaggaccaaatgaaattttcagttattatcatacttgctccttgaataagaatgctagagtctggaggcagaagaagactaagttaaaaaaaaaacagcctgaaggaattctggagtgagttttgtaagtctaattgtcaaagaagataaatggtctcagtatctgtagtaatttctggttaagcctagagggatcactgagtgccaatccaagcaggtggcactagaggcagattgttctcctagcatagagtgagtttccagctgctcatgacacattttcttatgattttccctaaaagaaaaccaaattttctactccacctcttcctttcctatcattccacttattgttgctgctttgctaacagccagcttagtaagccatcacacaagttagtgtgaggcttggttttaaaatagataacagagaatcttgattaaatagtatccaactttgtagcataacacagctaattcaggcaatgacatagagatgataagaaacaacatggtttggtagagggaacatttgatttagactctgcccatttttagctgtatgacttacataagtcattttgtgtccaagcctcattttctcccatatgaaaagtgaaggggttggattaaatgactaaaatccccttccagccctatgagcccaatgtattatgatctctgctttgtttccttcttaagaggcttcctactataaaatgtgacctatttacattttaagttgaagtagcccacaataatgaataatcaatttagatttttctcatctcctttgggagaaattaaattcaagcctctattcatttgatgttttacaacaagcttcaaagttggccatgttcattcacagtttgatattttgagacaccaataaaagttttttaataaaagttcccttgacttaaactcaccttcctaatagaagtagtgatttggctcacggaaaaatgtttccagagtcaacatgagaggactggatgaacctacagcctcactcaagctgttgcatcattgctgctgtagcaacagagccctctctgaatacccaaaacacacaattttctccaacaattctaattgcccacccagtatgggaatttgagagcctttggtgaataaccttgatcactcttttgaaatttggtacaacacttgcacaatcacggcaactgtttgtaaatatcttttcttctccgccagtatgtagacatgcacacccattcacaagtaagcccgcaaattcattttcacattttcctcttggtttgtttttatcatgggtatcacattgcaggaagagatgctctaacttacaagaatggaattttctgactatcattgccctcttcaaggcctgattagtttgtagggtggatgggatacaatgcatggtctacaaggtccatgtcaccagccatgatctttaaacaacctcttgcactttctggcactgctgcaatggcccatggtggacacctctgctgtttgtccaaacttctgctaaatagagtagtgttggtatttgttgtgttgtgaactcctttgttgtcagagaagacttcagctcttcaggtttgcaagggcaagatgtaaagctaggactgaaaggattgggttttgtttttcggccggcttttttccattagtgcaaaaaacctgatgcaagggcagcaagataaacacaatttcttcattgacccagataagaacctgtagaaaagtgagagatgcccctaagttcctatttcatttatcctaaataatatcctgaataactactgatcagtttttttctatgtccagccttgcttcactttccaacctccaggccaaatattcattttgatattttacaaaatccttctggtttttacacagggcccttttgtgctgagaataaaaccagctattggaacagacctcactgctttgtagagtcagaagttgacctagagaatgggtagcaacaggtcctcagtttctctggagacacccccaatccttgggtgagtgttgaaacctgacaactgactgttagccttgtcatcatcctcactggagatggagatgttgcagtcggagcctcactccttctggggcactgtttcttctcatggcaaccattttgcctgcctggaaacagcctgttgcctttgctagggggcaaatacacacactagccaaggaagttggtccagcacatctctgaggtttctcccccatggacccatggagcgaattccctgagataaatgatcagaaagttggctgtctggtggtttaatactccataagagttacttcccttatagaaagtcatcctttggcatctagatttttctacaaatcaccttaactccctccctttctctttctcctggaaaacctcagcattgcatctccatgttgcacaacacagatcagattatctggtcactatagagatttgtatataaaaaaactacttttttgaggattttgtatattgtttttctatttgttttctacagcttgaggaaagagctggcaaactgtgaatctaacttgatcttgttgccagcagatatattttggcttcctggtaagagtctgtgttaccagggacaatatattgccctctgatcagtattgcaccctaaatccacaaattcctccagcccagtcttacatttttttaaacaaatcccctagcttgtttgctattatttataaagagcattagaaaatgtatttatagacctggatgttatatgtttaatattaatttagcctttaataatgttataggtttgtaactattcttcagaaattataaagaactcagtgtagactgaattaatctatttagtatctgtaattttgcagacatattttcttacagtattttctatgtaaccacacatgtagaattataactaattagagcacaagaagtttcttcagcaatttagagctaccaattgtttcttgactatatagtcacatttgacaaatttaagaacccagtctttagtgatgcaataaacaaaatgaaccattaagaacaaggaattgcttaaatcccttagctggtgaggatatacatctaaataattcatctttctaactcaaggaatggtgctgattttttaaatgtttgacaccaggccttgtttttccagctgagcattctcattttgcttttctctaagactatcaaagacaaggtattaatagtaggattattcctagatcagaatgtttcatacattcctaaaggtttatgtggaaattggcttaggaaaactttgagtagcagagactgaggatgagtgctagagatgaaatcaggacagatttgttgcagttaattcttgccaagcaaattagtggtaaatgtcacattgttatgtgaattgagcacatatttttaaagaaagtttacaaaaaatttttagaaccaactatgaggcaatactgtatcactgggggctgggagtgggggcttagaatcatactgaaattgtttaaaagcagcccaggtagtttctgtcctcaggtgaataacagactatataacttccccgaaaggtaaaacgatagccactgcagagacgaggtgtcttccttccaccaaatactttctgagatggtggtaggagtagtatttttaccgtggtttaaaaagtagtcagttacatagaaagtgtattggtatgtatttgaacctgctcttcattaaacaaacagattagatgtaccctcgactggcaataattgtatctattttcaagtacagctagctgtcaaagcatgaagctcttgtgtatacacactgacacttggttcacgcatgaagaacagtgcctatgcactttgtgtagctataatgtaggtatctaggtgtaatttcagtgaaatggtgtatagatgtattgtaatttaaatgtatatgttatttttggctattcatctaaatgcagtagacatgttgatcggtgttttgcaaacatttctttttccttcttagataactagtcgtgaatcatttctcctctttctcagtgtggcttgggaatatatatgagtgaagaatttatctgtgaatcctttgtactgatgattgtttgaaagtctgtgtgtgtccagcacctttgtaaatacacaattcagagcagggatgggctgggtgtgtgtcctggttcttagtgaaaggtcatctcatgtctgtttaatacatggtgaatgcaactgtggaacttttgattacctagacttaggtaggtttagaatgagaacatccatctacagtcctcctttgcttggtggattgggctcagaggaacaaaaagttagtctgactctgtgcatattagcatcatgtctttagagaaaggtcagcctctctggttgccaaatactcatcatgatgctcatgacttaaaggttctgaggagccttgtctcccttggatttttgagtcagggtacaggaaaaaacattgctgactaactaactgcaaatgcatctgcaggtgaaaccctacgaaagcacagttctggctataaacttcagagttctctgtaaaaaacttagagcactagaagcacaggaatagtgagtgtacagcttatgcggttgtagaggggcaactgatgaacacaggtcccacatatatgagggagtatgacgttctctacctaatatgttctgtgtgcatgttttgaatgattgaagatgggattaactaatgcaagtttacagttgcctcctaaaacacacattctgtataattatcgctaaatacaatgctgtgaggtctatagttcctgtaacccctttctcctccccaaggacagagaagaactagccatgtgctatagggaaccctgagtgccctactcttttcccaagaagggtaaagcctacaatatcatcagggggcatgaagcacattaatttgcagtggctgcttcatatgaggagatatggtggacaggctaatttttccttgaaaatgtggcttcttcaactcctttcaaatttaggatggaatacttcctgaaataaaactgggctttatgcaggattctctttgaaaattcttgtatgtccagaacaaaagataaaactaattgtattcctcacattcacaatccccattggtctgaagtcacgtagcacagagcatctatagcacatagtgtttaaagactaatgaatgcaaaaagataaaatcttcaactaatttttgaattgtttctcatatatgctactagaaaatgccttgttgatgaagcacattttgggtagttgaggtcttttgttttcgcctttagctttctaagctttcttacaatgtggactgattactgtaacatttcacgtgtaaaataactggatattctttatatactggaaataacctgtgaatccaatatttcactaagtgttttaacttttgtgtatatatctctcatcaataaatgtggatttcaatttaaaaaaaaaaaaaaaa

SEQ ID NO: 344 - DNA, 7983 bp, Artificial Sequence
  CHL1
agggatcctacctcttttgaccggagatgttgaaaagcacgaccaaagtttttggcttggtctcttgctttccacaacgagataaagtctgaagcctgtaactctccctgtcccgcgggagcgtgcaaagggagggaagataagcggcgtgggtgaggggtggcggcgcagaacccaggaagggagcagaggcgagagccagcctccggcaggagggcgtagaccccggtgccagccagaacggctccagccttcccgcggccagagagccagcggcgggaggggacgggcgggacctccgcggacagccccgggtgcggaccagcgggcagcggccggcgagaccctccctggatccgcccagagcttaccggaccctgcgcgcccccgtcccggctcccggccggctcgggggagaaggcgcccgaggggaggcgccggacagatcgcgtttcggaggcggcgcaggtgctgtaaactgcaaaccataatcctgtcttaatactgcaaacaaatcatagtggaactaaggggaacttaatttactgtttccaggttaactaaggtctcagctgtaaaccaaaagtgagaggagacattaagattttcattcttaccgggttgtcttcttcctgaagagcaatggagccgcttttacttggaagaggactaatcgtatatctaatgttcctcctgttaaaattctcaaaagcaattgaaataccatcttcagttcaacaggttccaacaatcataaaacagtcaaaagtccaagttgcctttcccttcgatgagtattttcaaattgaatgtgaagctaaaggaaatccagaaccaacattttcgtggactaaggatggcaaccctttttatttcactgaccatcggataattccatcgaacaattcaggaacattcaggatcccaaacgaggggcacatatctcactttcaagggaaataccgctgctttgcttcaaataaactgggaatcgctatgtcagaagaaatagaatttatagttccaagtgttccaaaattcccaaaagaaaaaattgaccctcttgaagtggaggagggagatccaattgtcctcccatgcaatcctcccaaaggcctcccacctttacacatttattggatgaatattgaattagaacacatcgaacaagatgaaagagtatacatgagccaaaagggagatctatacttcgcaaacgtggaagaaaaggacagtcgcaatgactactgttgctttgctgcatttccaagattaaggactattgtacagaaaatgccaatgaaactaacagttaacagttcaaattccatcaagcaaagaaaacccaaactgctgttgcctcccactgagagtggcagtgagtcttcaattaccatcctcaaaggggaaatcttgctgcttgagtgttttgctgaaggcttgccaactccacaggttgattggaacaaaattggtggtgacttaccaaaggggagagaaacaaaagaaaattatggcaagactttgaagatagagaatgtctcctaccaggacaaaggaaattatcgctgcacagccagcaatttcttgggaacagccactcacgattttcacgttatagtagaagagcctcctcgctggacaaagaagcctcagagtgctgtgtatagcaccggaagcaatggcatcttgttatgtgaggctgaaggagaacctcaacccacaatcaagtggagagtcaatggctccccagttgacaatcatccatttgctggtgatgttgtcttccccagggaaatcagttttaccaaccttcaaccaaatcatactgctgtgtaccagtgtgaagcctcaaatgtccatggaactatccttgccaatgccaatattgatgttgtggatgtccgtccattgatacaaaccaaagatggagaaaattacgctacagtggttgggtacagtgctttcttacattgcgagttctttgcttcacctgaggcagtcgtgtcctggcagaaggtggaagaagtgaaacccctggagggcaggcggtatcatatctatgaaaatggcacattgcagatcaacagaaccaccgaagaagatgctgggtcttactcatgttgggtagaaaatgctataggaaaaactgcagtcacagccaatttggatattagaaatgctacaaaacttagagtttctcctaagaatcctcgtatccccaaattgcatatgcttgaattacattgtgaaagcaaatgtgactcacatttgaaacacagtttgaagttgtcctggagtaaagatggagaagcctttgaaattaatggcacagaagatggcaggataattattgatggagctaatttgaccatatctaatgtaactttagaggaccaaggtatttactgctgttcagctcatactgctctagacagtgctgccgatataactcaagtaactgttcttgatgttccggatccaccagaaaaccttcacttgtctgaaagacagaacaggagtgttcggctgacctgggaagctggagctgaccacaacagcaatattagcgagtatattgttgaatttgaaggaaacaaagaagagcctggaaggtgggaggaactgaccagagtccaaggaaagaaaaccacagttatcttacctttggctccatttgtgagataccagttcagggtcatagccgtgaacgaagtagggagaagtcagcctagccagccgtcagaccatcatgaaacaccaccagcagctccagataggaatccacaaaacataagggttcaagcctctcaacccaaggaaatgattataaagtgggagcctttgaaatccatggagcagaatggaccaggcctagagtacagagtgacctggaagccacagggagccccagtggagtgggaagaagaaacagtcacaaaccacacattgcgggtgatgacgcctgctgtctatgccccttatgatgtcaaggtccaggctatcaatcaactaggatctgggcctgaccctcagtcagtgactctctattctggagaagactatcctgatacagctccagtgatccatggggtggacgttataaacagtacattagttaaagttacctggtcaacagttccaaaggacagagtacatggacgtctgaaaggctatcagataaattggtggaaaacaaaaagtctgttggatggaagaacacatcccaaagaagtgaacattctaagattttcaggacaaagaaactctggaatggttccttccttagatgcctttagtgaatttcatttaacagtcttagcctataactctaaaggagctggtcctgaaagtgagccttatatatttcaaacaccagaaggagtacctgaacagccaacttttctaaaggtcatcaaagttgataaagacactgccactttatcttggggactacctaagaaattaaatggaaacttaactggctatcttttgcaatatcagataataaatgacacctacgagattggagaattaaatgatattaacattacaactccatcaaagcccagctggcacctctcaaacctgaatgcaactaccaagtacaaattctacttgagggcttgcacttcacagggctgtggaaaaccgatcacggaggaaagctccaccttaggagaagggagtaaaggtatcgggaagatatcaggagtaaatcttactcaaaagactcacccaatagaggtatttgagccgggagctgaacatatagttcgcctaatgactaagaattggggcgataatgatagcatttttcaagatgtaattgagacaagagggagagaatatgctggtttatatgatgacatctccactcaaggctggtttattggactgatgtgtgcgattgctcttctcacactactattattaactgtttgctttgtgaagaggaatagaggtggaaagtactcagttaaagaaaaggaagatttgcatccagacccagaaattcagtcagtaaaagatgaaacctttggtgaatacagtgacagtgatgaaaagcctctcaaaggaagccttcggtcccttaatagggatatgcagcctactgaaagtgctgacagcttagtcgaatacggagagggagaccatggtctcttcagtgaagatggatcatttattggtgcctacgctggatctaaggagaagggatctgttgaaagcaatggaagttctacagcaacttttccccttcgggcataaacacaacatatgtaagcaacgctactggttcaccccaaccttccatatttatctgttcaaaggagcaagaactttcatataggaatagaaacatgctggccgaagatttcatccagaagtcaacatcctgcaattatgttgaaaagagtagtactttcttcaaaatataaaatgccaagcacttcaggcctatgttttgcttatattgttttcaggtgctcaaaatgcaaaacacaaaacaaatcctgcatttagatacacctcaactaaatccaaagtccccattcagtatattccatatttgcctgattttactattcggtgtgtttgcatagatgttgctacttggtgggtttttctccgtatgcacattggtatacagtctctgagaactggcttggtgactttgcttcactacaggttaaaagaccataagcaaactggttatttaaaatgtaaaaaggaatatgaaagtcttattaaaacacttcattgaaaatatacagtctaaatttattatttaaattttactagcaaaagtcttaggtgaacaatcaactagtatttgttgagctcctatttgcccagagatggtcatatttaaacagaagtatacgtttttcagtttcaacatgaatttttttatttctgtcagttatgacatccacaagcatcactttttgtgtctgttttttttttttttcttggactaaattcaactgcatggaagcggtggtcagaaggttgttttatacgagaacaggcagaaagtgcccattgttcaggattctaatagctacatctacttaatatcttcatttctaaattgactgcttttacctttttctcatgtttatataatggtatgcttgcatatatttcatgaatacattgtacatattatgttaatatttacacaatttaaaatatagatgtgttttattttgaagtgagaaaatgaacattaacaggcatgtttgtacagctagaatatattagtaagatactgtttttcgtcattccagagctacaactaataacacgaggttccaaagctgaagactttgtataaagtatttgggttttgttcttgtattgctttctttcaacagtttcaaaataaaatatcatataaatattgagggaaatgttttcatatttttcaaaataggtttttattgttgaatgtacatctaccccagcccctcaaaagaaaaactgtttacatagaaattcctacacatacgtttgcgtatatgttattttaaacatctttgtggtgagaattttttccccgatattctccttctgtcaaagtcagaacaaattcagggaatttattttctggcagttgtgctccagtccttttaaaattgtacatgaacatgttttagaaacaatatggaggatgatgcatacatgtcggtcaagttcagcgctcgacattttatggaaagatttttttaaccttaccacgaaatacttaactactgtttaagtgaattgacttatttcactttagtttttgaactgtgattattggtatactgttatatcctcaacttggatttatggtaaccccttatagttcatggagaccaaaatttggggtatttataatagtcagcgcaggaatgcacatggaatatctacttgtccttttgaacctcacgagtcatccagaatgtatagacaggaaaagcatgtcttatttaaaactgtaatttatgggctcaggatctgaccgcagtcccgggagtaagcatttcaaagggggaaggcagtgtggtccctaccctgtgtgaatgtgaggatgtagacatccatcagtgcaactcgagctccatcctcctccgatttctaaggttccagttttctggagggacagtcatcatgttttgatttatctgggagaaaactgtggtgcacagcttgtgaggagggcaaggttgtgacgttcgagcttagttctggtgttattctgtctcctcttctttgtcatcagccaaaacgtggtttttaaagagagtcatgcaggttagaaataatgtcaaaaatatttaggaatttaataacctttaagtcagaaactaaaacaaatactgaaatattagctcttcctacacttcgtgttcccctttagctgcctgaaaatcaagattgctcctgctcagatcttctgagtggctaaaacttatggatatgaaaaatgagattgaatgatgactatgctttgctatcattgttacctttcctcaatactatttggcaactactgggactcttcagcacaaaaggaatagatctatgattgaccctgattttaattgtgaaattatatgattcatatattttatgaatcagaataaccttcaaataaaataaatctaagtcggttaaaatggatttcatgattttccctcagaaaatgagtaacagagtccacggcgtgcaatggtaattataaattggtgatgcttgtttgcaaattgcccactcgtgataagtcaacagccaatatttaaaactttgttcgttactggctttaccctaactttctctagtctactgtcaatatcattttaatgtaattgattgtatatagtctcaagaatggttggtgggcatgagttcctagagaactgtccaagggttgggaaaatccaaattctcttcctggttccagcactgattttgtacataaacattaggcaggttgcttaacctttttatttcaaactctctcaactctaaagtgctaataataatctcagttaccttatctttgtcacagggtgttcttttttatgaagaaaaatttgaaaatgataaaagctaagatgccttctaacttcataagcaaacctttaactaattatgtatctgaaagtcacccccacataccaactcaacttttttcctgtgaacacataaatatatttttatagaaaaacaaatctacataaaataaatctactgtttagtgagcagtatgatttgtacatgccattgaaaattattaatcagaagaaaattaagcagggtctttgctatacaaaagtgttttccactaattttgcatgcgtatttataagaaaaatgtgaatttggtggttttattctatcggtataaaggcattgatattttagatgcacccgtgtttgtaaaaatgtagagcacaatggaattatgctggaagtctcaaataatatttttttcctattttatactcatggaagagataagctaaagaggggacaataatgagaaatgttggtgtgcttttctaagcatttaaaacataattgccaattgaaaccctaaatatgtttacataccattaagatatgattcatgtaacaatgttaaattaattataatgggattgggtttgttatctgtggtagtatatatcctagtgttcctatagtgaaataagtagggttcagccaaagctttctttgttttgtaccttaaattgttcgattacgtcatcaaaagagatgaaaggtatgtagaacaggttcacgtgattacctttttcttttggcttggattaatattcatagtagaactttataaaacgtgtttgtattgtaggtggtgtttgtattatgcttatgactatgtatggtttgaaaatattttcattatacatgaaattcaactttccaaataaaagttctacttcatgtaatccaaaaaaaaaaaaa

SEQ ID NO: 345 - DNA, 1228 bp, Artificial Sequence
  AKR1C3
tgagggaagaagaaagaaacatttgctagccagctgagtgacagtgatggattcaaaacatcagtgtttgaagctaaatgatggtcacttcatgcctgtcctgggatttggcacctatgcacctccagaggttccgagaagtaaagctttggaggtcacaaaattagcaatagaagctgggttccgccatatagattctgctcatttatacaataatgaggagcaggttggactggccatccgaagcaagattgcagatggcagtgtgaagagagaagacatattctacacttcaaagctttggtccacttttcatcgaccagagttggtccgaccagccttggaaaactcactgaagaaagctcaattggactatgttgacctctatcttattcattctccaatgtctctaaagccaggtgaggaactttcaccaacagatgaaaatggaaaagtaatatttgacatagtggatctctgtaccacctgggaggccatggagaagtgtaaggatgcaggattggccaagtccattggggtgtcaaacttcaaccgcaggcagctggagatgatcctcaacaagccaggactcaagtacaagcctgtctgcaaccaggtagaatgtcatccgtatttcaaccggagtaaattgctagatttctgcaagtcgaaagatattgttctggttgcctatagtgctctgggatctcaacgagacaaacgatgggtggacccgaactccccggtgctcttggaggacccagtcctttgtgccttggcaaaaaagcacaagcgaaccccagccctgattgccctgcgctaccagctgcagcgtggggttgtggtcctggccaagagctacaatgagcagcgcatcagacagaacgtgcaggtttttgagttccagttgactgcagaggacatgaaagccatagatggcctagacagaaatctccactattttaacagtgatagttttgctagccaccctaattatccatattcagatgaatattaacatggagggctttgcctgatgtctaccagaagccctgtgtgtggatggtgacgcagaggacgtctctatgccggtgactggacatatcacctctacttaaatccgtcctgtttagcgacttcagtcaactacagctgagtccataggccagaaagacaataaatttttatcattttgaaataaaaaaaaaaaaaaaaaaaaaaaaaaaaa

SEQ ID NO: 346 - DNA, 1325 bp, Artificial Sequence
  CYB5D2
gggagcgcgagcactagcgcgcgagagagagagcgagagcgcgcgcgccgatgacgtcacgctcggcgtctcggccatcttagctgtagatagaggcggcaacctcggaagtgcggagcgggtgggcctatatagatgttgaggccgagacgcatccagagctttcgtgaccggggactgttctgaagcaggcctcgtggatgacgtatccgacctgtcagccgctgagatgctgacacttcacaattggctttcattctatgagaagaattatgtgtgtgttgggagggtgacaggacggttctacggagaggatgggctgcccaccccggcactgacccaggtagaagctgcgatcaccagaggcttggaggccaacaaactacagctgcaagagaagcagacattcccgccgtgcaacgcggagtggagctcagccaggggcagccggctctggtgctcccagaagagtggaggtgtgagcagagactggattggcgtccccaggaagctgtataagccaggtgctaaggagccccgctgcgtgtgtgtgagaaccaccggcccccctagtggccagatgccggacaaccctccacacagaaatcgtggggacctggaccacccaaacttggcagagtacacaggctgcccaccgctagccatcacatgctcctttccactctaagccgtagcctcttctgttaataacacacagagagctctgccaagcacctgagtaggcccttgacacttgtgtgccctgggatgcctcctggcgcgaatcaggagggtctggaaggactctggctatattctgcaaatgtggctcatgccccttaccgtggctcggcgttgtggtgcctgagggacagccggccacctgcccagtactggtcagcttttcaacactattccctttgacctactggccatcttcctcacagccctcagatatcaacgggcacaaataagaccaactcaatttccacttgaatttacaaccaaaagcctgctgagttgattacagctgggccaatacagtacgaggcaataacaaattagtgtgggttgattctggaattggaaaagcttttgcttgtatggatacagcaaatccagatgtctctgaacaaagcaacaatttaaagcaacgacattttctgtcctttaagcacttaaaatcaggtgtggtgtgttttcaaaggcagaagtctgcattttgagcaaaaggtggcttcccagctctaacaaggtaactggttagcatgacattaaagcttgggcaaggcttcaaacttaaggtgaaaaaaaaaaaaaaaaaa

SEQ ID NO: 347 - DNA, 3315 bp, Artificial Sequence
  CNTN1
cttctgctgtcaagtagccagggtgggctccgccgaggcgaggaggggcgccggtggggagatgcgctcccaggtgtttgcagcggaagtgggaaacctgtagggtatggtccagctgtgccgcaccgaggcgagcaggagcagggaacaggtgtttaaaattatccaactgccatagagctaaattcttttttggaaaattgaaccgaacttctactgaatacaagatgaaaatgtggttgctggtcagtcatcttgtgataatatctattactacctgtttagcagagtttacatggtatagaagatatggtcatggagtttctgaggaagacaaaggatttggaccaatttttgaagagcagccaatcaataccatttatccagaggaatcactggaaggaaaagtctcactcaactgtagggcacgagccagccctttcccggtttacaaatggagaatgaataatggggacgttgatctcacaagtgatcgatacagtatggtaggaggaaaccttgttatcaacaaccctgacaaacagaaagatgctggaatatactactgtttagcatctaataactacgggatggtcagaagcactgaagcaaccctgagctttggatatcttgatcctttcccacctgaggaacgtcctgaggtcagagtaaaagaagggaaaggaatggtgcttctctgtgaccccccataccattttccagatgatcttagctatcgctggcttctaaatgaatttcctgtatttatcacaatggataaacggcgatttgtgtctcagacaaatggcaatctctacattgcaaatgttgaggcttccgacaaaggcaattattcctgctttgtttccagtccttctattacaaagagcgtgttcagcaaattcatcccactcattccaatacctgaacgaacaacaaaaccatatcctgctgatattgtagttcagttcaaggatgtatatgcattgatgggccaaaatgtgaccttagaatgttttgcacttggaaatcctgttccggatatccgatggcggaaggttctagaaccaatgccaagcactgctgagattagcacctctggggctgttcttaagatcttcaatattcagctagaagatgaaggcatctatgaatgtgaggctgagaacattagaggaaaggataaacatcaagcaagaatttatgttcaagcattccctgagtgggtagaacacatcaatgacacagaggtggacataggcagtgatctctactggccttgtgtggccacaggaaagcccatccctacaatccgatggttgaaaaatggatatgcgtatcataaaggggaattaagactgtatgatgtgacttttgaaaatgccggaatgtatcagtgcatagctgaaaacacatatggagccatttatgcaaatgctgagttgaagatcttggcgttggctccaacttttgaaatgaatcctatgaagaaaaagatcctggctgctaaaggtggaagggtgataattgaatgcaaacctaaagctgcaccgaaaccaaagttttcatggagtaaagggacagagtggcttgtcaatagcagcagaatactcatttgggaagatggtagcttggaaatcaacaacattacaaggaatgatggaggtatctatacatgctttgcagaaaataacagagggaaagctaatagcactggaacccttgttatcacagatcctacgcgaattatattggccccaattaatgccgatatcacagttggagaaaacgccaccatgcagtgtgctgcgtcctttgatcctgccttggatctcacatttgtttggtccttcaatggctatgtgatcgattttaacaaagagaatattcactaccagaggaattttatgctggattccaatggggaattactaatccgaaatgcgcagctgaaacatgctggaagatacacatgcactgcccagacaattgtggacaattcttcagcttcagctgaccttgtagtgagaggtaaaaacagaaaaggtggagagaaaaacatggtggattcctttctccccgtctgtgcaagcctgcctccaacctggtgatcgttgacactcaccatttctgtgaaagacttttttttttttaacatattatactagatttgactaactcaatcttgtagcttctgcagttctccccacccccaacctagttcttagagtatgtttccccttttgaaacatgtaaacatactttgggcataaatattttttaaaatataactataatgcttcactaataccttaaaaatgcctagtgaactaactcagtacattatataatggccaagtgaaagttttgtgttttcatgtcctgtttttctttgaaattatatagcccagaaattagctcattatctgaaaaacgtatgaagaactgatgaattgtataatacaggagtattgccattgaatgtactgtttgatttattcaagcaggtaatgaacaatgttgtcaaactctctaatgagacatcataattaggacataagctaaaaggggcattactccggcagtctttttttcttaatcctagtaccatacatattctttggcatgaaagaatgaaaagcattagtaaacaactgaagtcctaccatggctctgtagggtttttggaacaattcctggaattggaaagtgaaaatggatagcatgtgggggaaaccctcatctgagtagcaagattttagtaaagatgactaagccattaacagcatgcattcatatttaattttattgactcctgccatcagcttttgtagatcgtttgggtggaaggttgtgatttttactgggaggacttgagtagaagtggatgattaaaattgaggagtatataattctttctgggactgcttaaatgttattgtttgaaaataccttcactttccccctttggtcaaagagatgtgcttaaaattcttattccttcacaataaataattttgattttcttagacaggtttgtgtttaggtatgagtttctcttttacttcatctagcaattctctctgtggtcagaagaactctgaagaaagctttgagggaaatgaatataactcttaaattattatatgtgtgtgtatatatatagtttaactttaaaaataatttattagtcatcataaagaaataaatgtctctggctcaagatgttacttatttccttcttttatattttctagtctcaattactgttccaaaaggagctatcttagaacttagactagagatccagattaa

SEQ ID NO: 348 - DNA, 2480 bp, Artificial Sequence
  TDRP
gagccgcaggcagagcgtccggcggccgggagggacgcggagccacagcccgacgcacggacggagggacgccggagcccgcctgaccatgtggaagctgggccggggccgagtgctgctggacgagccccccgaggaggaggacggcctgcgtggggggccgccaccggccgccgccgccgccgcccaggcgcaggttcagggagcaagtttccgaggttggaaagaagtgacttcactgtttaacaaagatgatgagcagcatctcctggaaagatgtaaatctcccaagtccaaaggaactaacttacgattaaaagaagagttgaaggcagagaagaaatctggattttgggacaatttggttttaaaacagaatatacagtctaaaaaaccagatgaaattgaaggttgggagcctccaaaacttgctcttgaagacatatcggctgaccctgaggacaccgtgggtggccacccatcctggtcaggctgggaggatgacgccaagggctcgaccaagtacaccagcctggccagctctgccaacagctccaggtggagcctgcgcgcggcagggaggctgattaaagaagtatggatcaattttagtcagttgataatttcatttaggaaacattgtcttgctcattatagagagttaagactgtgcataaaatactgaagtgcctcttttttattaggctcatatgtttgttcttgcaaagcgagatgcctattgtgattggtgttagatctgtaagaagctgtgttttttccacaagaataatcgacgaccggtttgagagcatctctcgcgttctttttctgtctgcttactgtccttgacaatgtgatcctgcacagtatcaggtgccagttatgcgtccctggaaggttggctcttatcagcaagtcctgcagatatctcttagataaaagtggtttgaaagaaaaggtatatttttcttttttgtttaaaagtaaaataaaacctccagttacactgtgcattcccctcacgtaaaaacaagacaaaaaccctttcctgagttgctcggcatgcactcctgtgctgtttcatgcatgtggatgttccttccgtttgttcctgtggaataactgagtgtgcctgatggcagaacacactgcagtgttatcagtgtctgcatgttttttaatagaacaggtttacttgatctgtcatctgttatgcaaaaaacagcaattacttttgcatccatctagctaaatctataatctgtgtcaatcacttatacctatcaatcatccgtatctattcacctgtcctctatgtctgtcttctctcagtctacatccatctagccttctgtcaatcatctacttttttttttaatagaacaagaagtttacttatcaagtcttgaaagggggacatgtttcaattggtgttcaaacaaaaattccagcttgtattagaaccttgaaatggtgaagttgtggaggttttctttgttccataatacagagacaagttcataatttttagtataacagctaagttgacaaattctaagtttcctcaggtaaatagtcataactgtccttttccctagagaagtgcttgctgggatagtaaaaacatacaccatttcatgacttctgcaaatactttccagcggaagtcagtgtaggtttgtttttggctaacatggtcttgctgcgcaggaatgtaaacactgtgtttgaaactctggaaatcacgtgtgtggggagatggggacgcttcccatgttgtggggagctctgtggctgtgatggctgcagttgccgtgcctctgttggaacgctaagtgcctgcaactcacgtcaatcatagaattgtgacgcacagttggcaaaatagttctttatgctatttctcaaaatttgaggacaaacccagattgggattggaatatgcactgtaaatcaaatttttcttatctacaaagactaatgtaaaaatgattttttcttctgtgcctgattaaattaactgtggtttttaatataaatatttattggtgtgctttgggagaaaaattatcttttcttgaaagaagttatcaaagcaaatttattatcttcacaagttaatgggagaatgtggttttgattctgggtgtttgaattgtgtaaacacacagcttccttgtgtgaagagagttgtcctgtgctccttctactgtactttttttattttttaataggaaagtgatgtgcttcagagaagggttcctccttaatgttgaggttttttaaaaataaaaatactgtttttaagctctttccttattggtttgcatgattattggcatctgcttacgatggctttaatcactcagagctaatggcacctttcctatttagcctcattttagaatgcagtcaacacatgtagacttttcacaaataaatgaacaacttcaaccttggttttcaaaaaaaaaaaaaaa

SEQ ID NO: 349 - DNA, 2202 bp, Artificial Sequence
  SAMSN1
ggaagctcagcagtgtccactgtcgccattccttggccatagaaaacaatgtatttgaattttgatgtaagcataacaaattgaagatgaagatgacacgttgatttcttgtttgaaattaaccaagtcccgagaaaagaaagtgaatagtgttagcacgaggaggaaggaagaaatggagattagattggatactctttctgcatcactgggtagatccagcactttaaataactgcaacttggaagataaattagcttggtatgaaggtgaagcttacatgtggcatcactggaagccttttcctgaaaaccctctctggacatgtcttgatttccaaatagcacaagttggaccctgggaccactgctcctcttgtattcgccacacacgtctcaagtcttcctgctcagatatggatctcctacattcatggcgaagcagcagttttgggaatttcgatcgttttcggaataattctttatcaaaaccagatgattcaactgaggcacatgaaggagatcccacaaatggaagtggagaacaaagtaaaacttcaaataatggaggcggtttgggtaaaaaaatgagagctatttcatggacaatgaagaaaaaagtgggtaaaaagtacatcaaagccctttctgaggaaaaggatgaggaagatggagagaatgcccacccatatagaaacagtgaccctgtgattgggacccacacagagaaggtgtccctcaaagccagtgactccatggatagtctctacagtggacagagctcatcaagtggcataacaagctgttcagatggtacaagtaaccgggacagctttcgactggatgacgatggcccctattcaggaccattctgtggccgtgccagagtgcatacggatttcacgccaagtccctatgacactgactccctcaaaatcaagaaaggagacatcatagacattatttgcaaaacaccaatggggatgtggacaggaatgttgaacaataaagtgggaaacttcaaattcatttatgtggatgtcatctcagaagaggaagcagcccccaagaaaataaaggcaaaccgaaggagtaacagcaaaaaatccaagactctgcaggagttcctagagaggattcatctgcaggaatacacctcaacacttttgctcaatggttatgagactctagaagatttaaaagatataaaagagagtcacctcattgaattaaatattgaaaacccagatgacagaagaaggttactatcagctgctgaaaacttccttgaagaagaaattattcaagagcaagaaaatgaacctgagcccctatccttgagctcagacatctccttaaataagtcacagttagatgactgcccaagggactctggttgctatatctcatcaggaaattcagataatggcaaagaggatctggagtctgaaaatctgtctgacatggtacataagattattatcacagagccaagtgactgaacacgcattcccaactatatatctacagatgcattccattttaactcttcttgagctaaaacgtcaaataggagaggaagataagataaatatttgtaaataaaacctaaagtttaaatgttttaatctgaataattgtacataaaattttgtatctctaacattccaaattactgtcaataaaatatatatttattattttaaatgctatgtgttaatatttcacttgcttgtattagaaaggcaaaatgtaagactttggtatgtgtgacatatgctttatttggctttattttacaagtacagtatctgcaaaaaacaaagtaaccttttttcatacctgccagttttgaatttatatatgttattgaacaaatagtaatagaggattcgctgttgaaacaagttgtccaagcaatgttatattcatttttatacttattgggaaagtgtgagttaatattggacacattttatcctgatccacagtggagttttagtaattatattttgttgatttcttcattttgttttctggtataaaagtagagataatgtgtagtcacttctgatttagtgaaaccaattgtaataattgtggaaatgttttgtctttaagtgtaaatattttaaaatttgacataccctaatgttaataataaaaagaactatttgcatattgcaaaaaaaaaaaaaaaaaa

SEQ ID NO: 350 - DNA, 8075 bp, Artificial Sequence
  CACNA1G
ccgccctccgccgctgccccccttttcgttcgccctctcggggcggcttcgccgaaggtagcgccgaatccggcaaccggagcctgggcgcgaagcgaagaagccggaacaaagtgagggggagccggccggctggcccgggaagccccaggggcgcaggggaagcgggactcgcgccgggcggggtttccctgcgccccggcgccccgcgggcagcatgcccctgcgggcagggggagctgggctgaactggccctcccgggggctcagcttgcgccctagagcccaccagatgtgcccccgccggggcccccgggttgcgtgaggacacctcctctgaggggcgccgcttgcccctctccggatcgcccggggccccggctggccagaggatggacgaggaggaggatggagcgggcgccgaggagtcgggacagccccggagcttcatgcggctcaacgacctgtcgggggccgggggccggccggggccggggtcagcagaaaaggacccgggcagcgcggactccgaggcggaggggctgccgtacccggcgctggccccggtggttttcttctacttgagccaggacagccgcccgcggagctggtgtctccgcacggtctgtaacccctggtttgagcgcatcagcatgttggtcatccttctcaactgcgtgaccctgggcatgttccggccatgcgaggacatcgcctgtgactcccagcgctgccggatcctgcaggcctttgatgacttcatctttgccttctttgccgtggagatggtggtgaagatggtggccttgggcatctttgggaaaaagtgttacctgggagacacttggaaccggcttgactttttcatcgtcatcgcagggatgctggagtactcgctggacctgcagaacgtcagcttctcagctgtcaggacagtccgtgtgctgcgaccgctcagggccattaaccgggtgcccagcatgcgcatccttgtcacgttgctgctggatacgctgcccatgctgggcaacgtcctgctgctctgcttcttcgtcttcttcatcttcggcatcgtcggcgtccagctgtgggcagggctgcttcggaaccgatgcttcctacctgagaatttcagcctccccctgagcgtggacctggagcgctattaccagacagagaacgaggatgagagccccttcatctgctcccagccacgcgagaacggcatgcggtcctgcagaagcgtgcccacgctgcgcggggacgggggcggtggcccaccttgcggtctggactatgaggcctacaacagctccagcaacaccacctgtgtcaactggaaccagtactacaccaactgctcagcgggggagcacaaccccttcaagggcgccatcaactttgacaacattggctatgcctggatcgccatcttccaggtcatcacgctggagggctgggtcgacatcatgtactttgtgatggatgctcattccttctacaatttcatctacttcatcctcctcatcatcgtgggctccttcttcatgatcaacctgtgcctggtggtgattgccacgcagttctcagagaccaagcagcgggaaagccagctgatgcgggagcagcgtgtgcggttcctgtccaacgccagcaccctggctagcttctctgagcccggcagctgctatgaggagctgctcaagtacctggtgtacatccttcgtaaggcagcccgcaggctggctcaggtctctcgggcagcaggtgtgcgggttgggctgctcagcagcccagcacccctcgggggccaggagacccagcccagcagcagctgctctcgctcccaccgccgcctatccgtccaccacctggtgcaccaccaccaccaccatcaccaccactaccacctgggcaatgggacgctcagggccccccgggccagcccggagatccaggacagggatgccaatgggtcccgccggctcatgctgccaccaccctcgacgcctgccctctccggggccccccctggtggcgcagagtctgtgcacagcttctaccatgccgactgccacttagagccagtccgctgccaggcgccccctcccaggtccccatctgaggcatccggcaggactgtgggcagcgggaaggtgtatcccaccgtgcacaccagccctccaccggagacgctgaaggagaaggcactagtagaggtggctgccagctctgggcccccaaccctcaccagcctcaacatcccacccgggccctacagctccatgcacaagctgctggagacacagagtacaggtgcctgccaaagctcttgcaagatctccagcccttgcttgaaagcagacagtggagcctgtggtccagacagctgcccctactgtgcccgggccggggcaggggaggtggagctcgccgaccgtgaaatgcctgactcagacagcgaggcagtttatgagttcacacaggatgcccagcacagcgacctccgggacccccacagccggcggcaacggagcctgggcccagatgcagagcccagctctgtgctggccttctggaggctaatctgtgacaccttccgaaagattgtggacagcaagtactttggccggggaatcatgatcgccatcctggtcaacacactcagcatgggcatcgaataccacgagcagcccgaggagcttaccaacgccctagaaatcagcaacatcgtcttcaccagcctctttgccctggagatgctgctgaagctgcttgtgtatggtccctttggctacatcaagaatccctacaacatcttcgatggtgtcattgtggtcatcagcgtgtgggagatcgtgggccagcaggggggcggcctgtcggtgctgcggaccttccgcctgatgcgtgtgctgaagctggtgcgcttcctgccggcgctgcagcggcagctggtggtgctcatgaagaccatggacaacgtggccaccttctgcatgctgcttatgctcttcatcttcatcttcagcatcctgggcatgcatctcttcggctgcaagtttgcctctgagcgggatggggacaccctgccagaccggaagaattttgactccttgctctgggccatcgtcactgtctttcagatcctgacccaggaggactggaacaaagtcctctacaatggtatggcctccacgtcgtcctgggcggccctttatttcattgccctcatgaccttcggcaactacgtgctcttcaatttgctggtcgccattctggtggagggcttccaggcggaggaaatcagcaaacgggaagatgcgagtggacagttaagctgtattcagctgcctgtcgactcccaggggggagatgccaacaagtccgaatcagagcccgatttcttctcacccagcctggatggtgatggggacaggaagaagtgcttggccttggtgtccctgggagagcacccggagctgcggaagagcctgctgccgcctctcatcatccacacggccgccacacccatgtcgctgcccaagagcaccagcacgggcctgggcgaggcgctgggccctgcgtcgcgccgcaccagcagcagcgggtcggcagagcctggggcggcccacgagatgaagtcaccgcccagcgcccgcagctctccgcacagcccctggagcgctgcaagcagctggaccagcaggcgctccagccggaacagcctcggccgtgcacccagcctgaagcggagaagcccaagtggagagcggcggtccctgttgtcgggagaaggccaggagagccaggatgaagaggagagctcagaagaggagcgggccagccctgcgggcagtgaccatcgccacagggggtccctggagcgggaggccaagagttcctttgacctgccagacacactgcaggtgccagggctgcatcgcactgccagtggccgagggtctgcttctgagcaccaggactgcaatggcaagtcggcttcagggcgcctggcccgggccctgcggcctgatgaccccccactggatggggatgacgccgatgacgagggcaacctgagcaaaggggaacgggtccgcgcgtggatccgagcccgactccctgcctgctgcctcgagcgagactcctggtcagcctacatcttccctcctcagtccaggttccgcctcctgtgtcaccggatcatcacccacaagatgttcgaccacgtggtccttgtcatcatcttccttaactgcatcaccatcgccatggagcgccccaaaattgacccccacagcgctgaacgcatcttcctgaccctctccaattacatcttcaccgcagtctttctggctgaaatgacagtgaaggtggtggcactgggctggtgcttcggggagcaggcgtacctgcggagcagttggaacgtgctggacgggctgttggtgctcatctccgtcatcgacattctggtgtccatggtctctgacagcggcaccaagatcctgggcatgctgagggtgctgcggctgctgcggaccctgcgcccgctcagggtgatcagccgggcgcaggggctgaagctggtggtggagacgctgatgtcctcactgaaacccatcggcaacattgtagtcatctgctgtgccttcttcatcattttcggcatcttgggggtgcagctcttcaaagggaagtttttcgtgtgccagggcgaggataccaggaacatcaccaataaatcggactgtgccgaggccagttaccggtgggtccggcacaagtacaactttgacaaccttggccaggccctgatgtccctgttcgttttggcctccaaggatggttgggtggacatcatgtacgatgggctggatgctgtgggcgtggaccagcagcccatcatgaaccacaacccctggatgctgctgtacttcatctcgttcctgctcattgtggccttctttgtcctgaacatgtttgtgggtgtggtggtggagaacttccacaagtgtcggcagcaccaggaggaagaggaggcccggcggcgggaggagaagcgcctacgaagactggagaaaaagagaaggaaagcccagtgcaaaccttactactccgactactcccgcttccggctcctcgtccaccacttgtgcaccagccactacctggacctcttcatcacaggtgtcatcgggctgaacgtggtcaccatggccatggagcactaccagcagccccagattctggatgaggctctgaagatctgcaactacatcttcactgtcatctttgtcttggagtcagttttcaaacttgtggcctttggtttccgtcggttcttccaggacaggtggaaccagctggacctggccattgtgctgctgtccatcatgggcatcacgctggaggaaatcgaggtcaacgcctcgctgcccatcaaccccaccatcatccgcatcatgagggtgctgcgcattgcccgagtgctgaagctgctgaagatggctgtgggcatgcgggcgctgctggacacggtgatgcaggccctgccccaggtggggaacctgggacttctcttcatgttgttgtttttcatctttgcagctctgggcgtggagctctttggagacctggagtgtgacgagacacacccctgtgagggcctgggccgtcatgccacctttcggaactttggcatggccttcctaaccctcttccgagtctccacaggtgacaattggaatggcattatgaaggacaccctccgggactgtgaccaggagtccacctgctacaacacggtcatctcgcctatctactttgtgtccttcgtgctgacggcccagttcgtgctagtcaacgtggtgatcgccgtgctgatgaagcacctggaggagagcaacaaggaggccaaggaggaggccgagctagaggctgagctggagctggagatgaagaccctcagcccccagccccactcgccactgggcagccccttcctctggcctggggtcgagggccccgacagccccgacagccccaagcctggggctctgcacccagcggcccacgcgagatcagcctcccacttttccctggagcaccccacggacaggcagctgtttgacaccatatccctgctgatccagggctccctggagtgggagctgaagctgatggacgagctggcaggcccagggggccagccctctgccttcccttctgcccccagcctgggaggctccgacccacagatgcagccccaccccacggagctgccaggaccagacttactgactgtgcggaagtctggggtcagccgaacgcactctctgcccaatgacagctacatgtgtcggcatgggagcactgccgaggggcccctgggacacaggggctgggggctccccaaagctcagtcaggctccgtcttgtccgttcactcccagccagcagataccagctacatcctgcagcttcccaaagatgcacctcatctgctccagccccacagcgccccaacctggggcaccatccccaaactgcccccaccaggacgctcccctttggctcagaggccactcaggcgccaggcagcaataaggactgactccttggacgttcagggtctgggcagccgggaagacctgctggcagaggtgagtgggccctccccgcccctggcccgggcctactctttctggggccagtcaagtacccaggcacagcagcactcccgcagccacagcaagatctccaagcacatgaccccgccagccccttgcccaggcccagaacccaactggggcaagggccctccagagaccagaagcagcttagagttggacacggagctgagctggatttcaggagacctcctgccccctggcggccaggaggagcccccatccccacgggacctgaagaagtgctacagcgtggaggcccagagctgccagcgccggcctacgtcctggctggatgagcagaggagacactctatcgccgtcagctgcctggacagcggctcccaaccccacctgggcacagacccctctaaccttgggggccagcctcttggggggcctgggagccggcccaagaaaaaactcagcccgcctagtatcaccatagacccccccgagagccaaggtcctcggaccccgcccagccctggtatctgcctccggaggagggctccgtccagcgactccaaggatcccttggcctctggcccccctgacagcatggctgcctcgccctccccaaagaaagatgtgctgagtctctccggtttatcctctgacccagcagacctggacccctgagtcctgccccactttcccactcacctttctccactgggtgccaagtcctagctcctcctcctgggctatattcctgacaaaagttccatatagacaccaaggaggcggaggcgctcctccctgcctcagtggctctgggtacctgcaagcagaacttccaaagagagttaaaagcagcagccccggcaactctggctccaggcagaaggagaggcccggtgcagctgaggttcccgacaccagaagctgttgggagaaagcaatacgtttgtgcagaatctctatgtatattctattttattaaattaattgaatctagtatatgcgggatgtacgacattttgtgactgaagagacttgtttccttctacttttatgtgtctcagaatatttttgaggcgaaggcgtctgtctcttggctattttaacctaaaataacagtctagttatattccctcttcttgcaaagcacaagctgggaccgcgagcacattgcagccccaacggtggcccatcttcagcggagagcgagaaccattttggaaactgtaatgtaacttattttttcctttaacctcgtcatcattttctgtagggaaaaaaaaaagaaaaagaaaaaatgagattttacaagtgaaatggaacctttttatatatacatacatacatatctatctatctatctatatatatataaaataaagtaattttcctaaataaaaaaaaaaaaaaaaaaaa

SEQ ID NO: 351 - DNA, 7638 bp, Artificial Sequence
  MEGF10
acccgcccccaccccctccagcatctcgggccagacagagaaaaccttgttcaagtttgcagcaagtactttcccggtgcgcaaaactgggcgactgggaacgcgttgagacgttcctctttcccgcttctccacctttacgcctgaaagaagactcccaaagattgctttcttctgggacgctgcttggacgctaaccgcgttgattggaacagattttgtgtcttggctggctttgggtgaagaccggggagaaaaggttgcgctgcgattctcaagatctctggacctgggttgttcttcagaaaaaaatggttatttctttgaactcatgcctgagctttatttgtttattgttatgccactggattgggacagcatcacctctgaatcttgaagaccctaatgtgtgtagccactgggaaagctactcagtgactgtgcaagagtcatacccacatccctttgatcaaatttactacacgagctgcactgacattctaaactggtttaaatgcacgcggcacagagtcagctatcggacagcctatcgacatggggagaagactatgtataggcgcaagtctcagtgttgtcctggattttatgaaagcggggaaatgtgtgtcccccactgtgctgataaatgtgtccatggtcgctgtattgctccaaacacctgtcagtgtgagcctggctggggagggaccaactgctccagtgcctgcgatggtgatcactggggtccccactgcaccagccggtgccagtgcaaaaatggggctctgtgcaaccccatcaccggggcttgccactgtgctgcgggcttccggggctggcgctgcgaggaccgctgtgagcagggcacctatggtaacgactgtcatcagagatgccagtgccagaatggagccacctgcgaccacgtcacgggggaatgccgctgcccaccaggatacaccggagccttctgtgaggatctttgtcctcctggtaaacatggtccacagtgtgagcagagatgcccttgtcaaaatggaggagtgtgtcatcacgtcactggagaatgctcttgcccttctggctggatgggcacagtgtgtggtcagccttgccccgagggtcgctttggaaagaactgttcccaagaatgccagtgccataatggagggacgtgtgatgctgccacaggccaatgtcattgcagtccaggatacacaggggaacggtgccaggatgagtgtcctgttgggacctatggcgttctctgtgctgagacctgccagtgtgtcaacggagggaagtgttaccacgtgagcggcgcatgcctctgtgaagcaggctttgctggcgagcgctgcgaagcacgcctgtgtcctgaggggctctacggcatcaaatgtgacaaacggtgtccctgccacctggaaaacactcatagctgtcaccccatgtctggagagtgtgcctgcaagccgggctggtcaggactctactgtaatgagacatgttctcctggattctacggggaagcttgccagcagatctgcagctgccaaaatggggcagactgtgacagtgtgactggaaagtgcacctgtgccccaggattcaaaggaattgactgctctaccccatgccctctgggaacctatgggataaactgttcctctcgctgtggctgtaaaaatgatgcagtctgctctcctgtggacgggtcttgtacttgcaaggcaggctggcacggggtggactgctccatcagatgtcccagtggcacatggggctttggctgtaacttaacatgccagtgcctcaacgggggagcctgcaacaccctggacgggacctgcacgtgtgcacctggatggcgcggggagaaatgcgaacttccctgccaggatggcacgtacgggctgaactgtgctgagcgctgcgactgcagccacgcagatggctgccaccctaccacgggccattgccgctgcctccccggatggtcaggtgtccactgtgacagcgtgtgtgctgagggacgctggggccccaactgctccctgccctgctactgtaaaaatggggcttcatgctcccctgatgatggcatctgcgagtgtgcaccaggcttccgaggcaccacttgtcagaggatctgctcccctggtttttatgggcatcgctgcagccagacatgcccacagtgcgttcacagcagcgggccctgccaccacatcaccggcctgtgtgactgcttgcctggcttcacaggcgccctctgcaatgaagtgtgtcccagtggcagatttgggaaaaactgtgcaggaatttgtacctgcaccaacaacggaacctgtaaccccattgacagatcttgtcagtgttaccccggttggattggcagtgactgctctcaaccatgtccacctgcccactggggcccaaactgcatccacacgtgcaactgccataatggagctttctgcagcgcctacgatggggaatgtaaatgcactcctggctggacagggctctactgcactcagagatgtcctctagggttttatggaaaagattgtgcactgatatgccaatgtcaaaacggagctgactgcgaccacatttctgggcagtgtacttgccgcactggattcatgggacggcactgtgagcagaagtgcccttcaggaacatatggctatggctgtcgccagatatgtgattgtctgaacaactccacctgcgaccacatcactgggacctgttactgcagccccggatggaagggagcgagatgtgatcaagctggtgttatcatagttggaaatctgaacagcttaagccgaaccagtactgctctccctgctgattcctaccagatcggggccattgcaggcatcatcattcttgtcctagttgttctcttcctactggcattgttcattatttatagacacaagcagaagggaaaggaatcaagcatgccagcagttacctacacccctgctatgagggtcgtcaatgcagattataccatttcaggaacccttcctcacagcaatggtggaaacgctaatagccactacttcaccaatcccagttaccacacgctcacccagtgtgccacatcccctcacgtcaacaacagggacaggatgactgtcacgaagtcaaaaaacaatcaactgtttgtgaatcttaaaaatgtgaaccctgggaagagaggccctgtgggggactgcactgggacattgccggctgactggaaacatggcggctacctcaacgagctcggtgcttttggacttgacagaagctatatgggaaaatccttaaaagacctgggaaagaattctgaatataattcaagtaactgctccctaagcagttctgagaacccatatgccactattaaagacccacctgtacttatcccgaaaagctcagagtgtggttatgtggagatgaaatcgccggcacgaagagattccccatatgcagagatcaataactcaacttcagccaacaggaatgtctatgaagttgaacctacagtgagtgttgtccaaggagtattcagcaataatgggcgtctctcccaggatccatatgacctcccaaagaacagtcacatcccttgtcattatgacctgctgccagtccgagacagttcatcctcccctaagcaagaggacagtggtggtagcagcagcaacagcagcagcagcagtgaatgacaccaaaggaccgcttggtagccactggaaccctttccagaactgctgtttggttcttctccatcctcaattttgccactttcatgtgaatgttagtcaattcggtgggcaatttttggacatgaaccagaaagctgaaagctgaggctgacacggactgtaggtgctttttgttcaggtggattcgaaggagttagagatgtgatttcccattgctgttagttttagaactatacccgtgaagcatgacttattgtaagatgttggctgaaagcatgaacttgcagaactccctcggagacgcaggttgcagtggacattgggattgttgcttgaaaaattaaaatttgaatattttctctctcatttgcatcatacagctctacctaggattgtacagtttaccataaaatttacttcatgaaagtgggaatcactgaacatgtagaagacaaggaacatattgttaactcctgattcttaactttattcaactggactcagaattgtagggataatatgaatgcaggaggaaacattctgtcaggcggtatgactggacagactttgaatatactctaaaagtggacagaaaatttacgaaaatcttagattttgtttagaatgagaaaatatacaattagaattattttagaaatagtaggaagtattgcagaagtcaatacacaaatgtgccaggcagaggtggttttctctgtttgactctcaaccaacttcagatctatgacattattctgatcactggctccatcatacatattcaccacttgagattcataacatatcaatagttatttcataaatatagaaatgaaataattttatttttgacagactggatggaatgagtgtgtaatgattgataaaggttgtaaattttaaatgcaagatgacgcttacgttctgtaaaccattagtaatacatgctgtaatatagaattagtggaacattttgattaatctttccctagaagtgactgaaatatttttgtgcatatttgagaaagggaactttccttttattaattgtcaatttagagaaactatgcttaagctggtcttttgcattgctaatgtgacatgtacccaacttttcattaatttgtatttccatttttaaattgcatattctatgttttgtagtgtttggattgttaatgaaaaaatattatatgttcgttattccttgtattattgccacttatcttttgcttgataaaaatgcgttgttcttttttcttttggagggacaagatgaaaatatataatttgaattgattaaaattggtcgttactaaaatagtatagtaaccacaagtgattggcttataaatgaagtagaaatgctttttaatattccaaaatagagttccttttgatctgttggtgctgagccttggttaaaccagggagaaggggagcagaaaggaaacgttgttactgatgagtaccacagactcatcttaaaaaaaactctcattatggtgatcatagaattgaccatccaaactgggacactcttgagagtaaatggagggcattattaataattatcttgtaatgaacttaaatctggactgttccaggcaaaccagacttatcttgcaatatgagaatgctgacacaatgcaggaaagccagtttcccttttgttgatctacttgaccaagcaaaggggctgaaaaactgaataaggaaacaactttataagagaaacagtggtcttcaatcttttaaagacatgaaatcctatatggcattctgtctcagtgagtcagttaacaaatacgtatgtgcaacccttctgctagtagtgcacataagtgattatccctgccaggtatcgagttggaatatccagttatttcatgtcacacatcggcacgtatgatggtggtttggtcagatggataatacagcagacacacttagaacactcactgcactggtggctgttcattttgaggaactccaaagtcaattcaaggaaataaggaatgacctggaacaggccttagaaacaattgatttattccaatagttaaccactggctggctcccaactctaggtgataggcatctaattgagacatgtgtgagtcaatagccatcggggtcctttttggtgagaagaaataagacattttctcccttttaaagatcatctcttcagagctgcatggtaaatttgaatttccccattgttctctagagctaggtcaaaaaaacaactgtttcttttcttattccactattaataaattgaaagcttgctgtacaaaggcaacagcaacttaaaaaagaaaatctggacaatagatgtggactccaaggggccactgccatcccttcctgtgtgctctttttgacaagtaaatcactccagttagctgatgtcctgaaatgacatttgtacctgaggcaattcttattagagcttactcaggacttttcaaacatcaggacacacatagcaatttggatgttgtaaaactacgtgttacatttggagaggtcttgttgagaaggcaaaattttctaaatattttgatatcaatttgggtaaagaaaggaatacttttgttagaatgagaattaaagagaaaacaaaagaatcttggcaaaattttccctctgaaattacaaactttaggaacttttccagatgtatcgaatttaatttgacattgatgtcactcttcataccaagtgaatctattctcatgaactttgaacccatgttaattttggaccctataactaatttcctttctgtatcccatggtggtcaaagcagtaaaggagtttagagatacttagcaaatgccattcatatagtattgttagccaaactattattccttccttagaagttgatgtatcagaaaatttataagttatttgtatttatatataagtacatcagaacttgcccacatgataactcatgtttgctttaataaggaaaatatgttatttgaggttaattatatgatagtgaggaacattttacaattatttacagtgtttgacattaattgctgtcctatgatacagtagtaatgttaacagagagtttaatatgtttagcattatctttatggaatttatattcaccaatttcaggaaaaccaaccatagaactttataataggacagttataacctgactgaaccaaatccatcagcataatgactgtgtgttctgagaaatgcaaacaactttatgaaagtgtggtcatcttgacccccaaagagccacagtagctgtcaattattgagatttttaaatggtaaatattgcaaaagttaaacaagggtaccacaatatcatttataattgatgtcaatattagtagtccactttatgcttaaaataaaatcataaaaaatcaagttttaaggttatattttttaaaataatgaattttctatctctaggcaacatgtctttattattcaagctgaatgtttaagagagattttggtcttaaaggcttcacatcatgaaagtgtacatgcatatgcaagtgtgaattacgtggtatggatgtttgcttgtttattaactaaagatgtacagcaaactgcccgtttagagtcctgttaatattgatgtcctaacactgggtctgcttatgctagttcagtatttggtctaggcttcattttgatatgactgaattgcaatctatatttttaaaaagaaaaatcaaaatacattagggtttacttggttgtggcaaacaaacaaaaaatgctttcagtgttgaaatatctctattttccaaagatgataaactttcatcgttcttagcctacattgtcatttatatcaccaaatgagtttatagattaatgcaataaactttctaataaaaaa

SEQ ID NO: 352 - DNA, 5657 bp, Artificial Sequence
  ENC1
agagtccagccgggggtgccgcacccactggggagtggggagggaggacacataggaaatgcctggggctggagtctctttggctctctgccagcaagaaacttaaacgtcctggcttgctcaacccgagtgtccctaaactgtccagacttttgcccgtccattgccactatctctccccactctgggtgtcctacccaaggcgctgtctatgcgtgcccagggcctgtcctgcggatacccagctcgccccttgcagccctttttagagcatctcgcgggctctggcatcaccaagcgcacagccccgggctgcgctcccctaaggtgggtccctcagatccggggctgtccattaaccaggctggcccaaagaggcgcagacactcgaacccgggaaaacttattttattctcggttcccggggttgcagctgccagcggctgagacagtgcgtccgctttgtctctctgcactccccgcagcccccctctcccgcttcctctcccgattaactcccccgacacgctcttctctagctcctctcctcctcccactccttctcctcctcttcctcctcctacaccacaggccgcgctaatgcgcttcctccctcccccggtgtcggtctctttgcatacgcgccccctcccctccccgccgcgccacttatagcggggcgcacggcggcggggcgcagactgctctggcagccggagaggaggcggtgcggcggtggcgctgcggagacccggtccagacgcctggcggccgccggcacacaaggcgctttctagctccctcccccgagcgcacagcccgcctccttccgcggcgcctgcagtggcaggcttgctctgccctaccgtgacgcgctccggagacgctctgcgggtcctggacaccgggtccgcggcgtggggacgacagacggaggcgaacgccatcggtagccggtccgcgagccatcgttcggggcgcagtcctctccccggctggccctcctttctccggggcattcgccaccgcttccctgggctgagacgaccggttcgtcgcctccttgcccgtgaccgtcgctagaactcagttgtgcgttgcggccagtcgccactgctgtgtcagcatttgcaggtatacaggaacagtcctagtgatgcactatttaatcaaaagacggatggatcttttgttcttgcagctggttttccaagaattgatataaagcgggaagaacagaaaacagcagtcataagagtggaaacaaaatgtcagtcagtgtgcatgagaaccgcaagtccagggccagcagcggctccattaacatctatctgtttcacaagtcctcctacgctgacagcgtcctcactcacctgaatcttttacgccagcagcgtctcttcactgacgtccttctccatgccggaaataggaccttcccttgccaccgggcagtgctggctgcatgcagtcgctactttgaggccatgttcagtggtggcctgaaagagagccaggacagtgaggtcaactttgacaattccatccacccagaagtcttggagctgctgcttgactatgcgtactcctcccgggtcatcatcaatgaagaaaatgcagaatcgctcctggaagctggtgacatgctggagtttcaagacatccgggatgcatgtgcagagttcctggaaaagaacctgcatcccaccaactgcctgggcatgctgctgctgtctgatgcacaccagtgcaccaagctgtacgaactatcttggagaatgtgtctcagcaacttccaaaccatcaggaagaatgaagatttcctccagctgccccaggacatggtagtgcaactcttgtccagtgaagagctggagacagaggatgaaaggcttgtgtacgagtctgcaattaactggatcagctatgacctgaagaagcgctattgctacctcccagaactgttgcagacagtaaggctggcacttctgccagccatctatctcatggagaatgtggccatggaggaactcatcaccaagcagagaaagagtaaggaaattgtggaagaggccatcaggtgcaaactgaaaatcctgcagaatgacggtgtggtaaccagcctctgtgcccgacctcggaaaactggccatgccctcttccttctgggaggacagactttcatgtgtgacaagttgtatctggtagaccagaaggccaaagaaatcattcccaaggctgacattcccagcccaagaaaagagtttagtgcatgtgcgattggctgcaaagtgtacattactggggggcgggggtctgaaaatggggtctcaaaagatgtctgggtttatgataccctgcacgaggagtggtccaaggctgcccccatgctggtggccaggtttggccatggctctgctgaactgaagcactgcctgtatgtggttggggggcacacggccgcaactggctgcctcccggcctccccctcagtctctctaaagcaggtagaacattatgaccccacaatcaacaaatggaccatggtggccccactccgagaaggcgttagcaacgccgcagtagtgagtgccaaacttaagttatttgctttcggaggtaccagtgtcagtcatgacaagctccccaaagttcagtgttacgatcagtgtgaaaacaggtggactgtaccggccacctgtccccagccctggcgttacacagcagcagctgtgctggggaaccagatttttattatggggggtgatacagaattctctgcctgctctgcttataaattcaacagtgagacttaccagtggaccaaggtgggagatgtgacagcaaagcgcatgagctgccatgctgtggcctctggaaacaaactctacgtggttggaggatactttggcattcagcgatgcaagactttggactgctacgatccaacattagacgtgtggaacagcatcaccactgtcccgtactcgctgattcctactgcatttgtcagcacctggaaacatctgccttcttaaatgcagtacattctaaagagagtgagcatgagctcactccatcactcgatgagataatatgagatttctacttcggagaggccaagtctaatgaagagaaaaaaaggaaaagaagttgcaagactcgaataaaatctgctgcaccttgtaaatgctctaactggacatgaaggaaaggggcgagggaggggggtgggatttttggtgcaagtagcacatggtttaaatatgaatgaacaaacctgtgatctagtccttgtcttgtaattgtggattaatgtcaatgttaatcagcccctcaaagggagagaaaagctggaccttttcccttgctgtaccatattcagcatttgatttccatgggccccaccatttatgtgtagaatttgaaatggttgtcacctctctctgaggacagagcttgaagcctccacaccagctgctgctggagattcaaagcccaactgtgggtccgagagggaagctggctgggctggctgaagaatgaagaccactggactctccgttaatctctaaggggtctgctccccaggaacgtttctgaacaatggggactttgttggtagccatttggtagatgttcttttctatttataagtgactttaaactttcccttggctgttaagaagtttgttatagatttagctatttattgttcgatgcctgcatgctgaaacaatgcctacagctgtcttcacatgtatggacgtgtgtgaatggttgtacgttttgcacattttgtggctgttgagatgtgctttgctgcacaaacatgaaaatttttgagttacaatttggagcataactggagggtgggttggggaggggtggatttttaaaatgtcaagacagggaaggatgacaaaatggaaatttaaatgacatcctagaggtagagaaaccgtggagatcgcttttctcagactcaccaacttttaatgggatttcatggggtttggttgtgctgatagggtaaggggaggctgctttctgcccttctccccactcccatctgatttacttaattcagtctcagctgctgaaatttggaaaggaccaaattgctttacagtttttttctttgtgtagtatcttgaaatcctggaaaattctatggaatagttctgtatatagggcacaagtaaaggcattgtccaaagtttatttatttatttattaccctaagaatgctttgccataaccacatttaatgggaaaaacggcagtatcacagatgtaaattaactcaccagatttactgggcctgaactcattctcttcttgctatatgatttagcaagttctagaaggtctccaagacaataattacattggcacaatgtatacttcagtgctcacccgtaggcaaatctctttttaaaaaactctttggtgcacaagtaacacatttggccacaaaacaccaaagaattgtaggcagtggcccctattgagaagttttccggtagagttggaaatcagttgtgaatacattctttgctagttggagtgcttgtttactaagcatgtgccgtcgtaggtattagtgctagtctcagataggtgcttcccctgaggtgcaggggaagaccaaagtttgcaactcgaactgctttcgtccatgtttctcacattgctgtattttagaaaataggggttaagactgataacaaccttttacattgtgactgtgtttgcattgtctaatgacagataaatccttaacatttctctccaccttagtactttagactaattgtgtttgtccgtccatgccatgaatgagtgggctgtagttgggcctaaataaatgagctgttggaagaaaagaatcacagtactttccagcagtcagtccctggttcctagatgtgttctaagcaatgcaaatgtctaattgtcccccagtgggcatagtcagtgtcgtttatattgtagcagttacagctctgtagtttatgatgcaaatctgccaagagagatgtatgtgtcactgcatggcttctgaaagcaggatgaattttctgcagctgtttcaaagttggggtctgttcttgaatcctctattaattactgtgtgtgagccagagggagctgtggtaagggttgggcccccagcctgtagggaactttctggactcccactctttgaatcgatataggcatttggtctcactacttgaccattctcaccctgtgaaacgtcccacactttgaagcaaatacaattcacagcacagtacacacaaaaaccttggcataagacagagaaggttcttcttattttgtgggctggttgctgtagaaacacataacaaagggcagccctccacttctggtataattgtgtagccccttttctttgggcttgacacctgtcttgaataagagtgattagagctgcataatgtccctctcttggctattgaccatgtggttcacgtacaaaactctgtataagttgaaggaaaatgttcatgttcatatgtacttgtttgctatgactacattttgaggttttgtaaaactgttatttttttttttttcacaatgtgaaactgaaggtcaataaattattagagattttctcttcatta

SEQ ID NO: 353 - DNA, 2262 bp, Artificial Sequence
  CCT4
ggcaaggaaggcccccttctccgcctccgcctcctcccgacgccggcgccgctttctggaaggttcgtgaaggcagtgagggcttaccgttattacactgcggccggccagaatccgggtccatccgtccttcccgagccaacccagacacagcggagtttgccatgcccgagaatgtggcaccccggagcggggcgactgccggggctgccggcggccgcgggaaaggcgcctatcaggaccgcgacaagccagcccagatccgcttcagcaacatttccgccgccaaagcggttgctgatgctattagaacaagccttggaccaaaaggaatggataaaatgctggtggagctgtctaaggctcaagatatagaagcaggagatggcaccacatcagtagtcatcattgctggctccctcttagattcttgtaccaagcttcttcagaaagggattcatccaaccatcatttctgagtcattccagaaggccctggaaaagggcattgaaatcttgactgacatgtctcgacctgtggaactgagtgacagagaaactttgttaaatagtgcaaccacttcactgaactcaaaggtggtttctcagtattcaagtctgctttctccaatgagtgtaaatgcagtgatgaaagtgattgacccagccacagccaccagtgtagatcttagagatattaaaatagttaagaagcttggtgggacaattgatgactgtgagttggtggaagggctggttctcacccaaaaagtgtcaaattctggcataaccagagttgaaaaggccaagattgggcttattcagttttgcttatctgctcccaaaacagacatggataatcaaatagtggtttctgactatgcccagatggaccgagtgctgcgagaagagagagcctatattttaaatttagtgaagcaaattaaaaaaacaggatgtaatgtccttctcatacagaaatctattctaagagatgctcttagtgatcttgcattacactttctgaataaaatgaagatcatggtgattaaggatattgaaagagaagacattgaattcatttgtaagacaattggaaccaagccagttgctcatattgaccaatttactgctgacatgctgggttctgctgagttagctgaggaggtcaatttaaatggttctggcaaactgctcaagattacaggctgtgccagccctggaaaaacagttacaattgttgttcgtggttctaacaaactggtgattgaagaagctgagcgctccattcatgatgccctatgtgttattcgttgtttagtgaagaagagggctcttattgcaggaggtggtgctccagaaatagagttggccctacgattaactgaatattcacgaacactgagtggtatggaatcctactgcgttcgtgcttttgcagatgctatggaggtcattccatctacactagctgaaaatgccggcctgaatcccatttctacagtaacagaactaagaaaccggcatgcccagggagaaaaaactgcaggcattaatgtccgaaagggtggtatttccaacattttggaggaactggttgtccagcctctgttggtatcagtcagtgctctgactcttgcaactgaaactgttcggagcattctgaaaatagatgatgtggtaaacactcgataatctggataactgactagcaccattatgatcaccagtattgtggctggaatggaagaagatcaccttggtgttccttgtttggaagattatttcctctgaatttctgggcttggtcttccagttggcatttgcctgaagttgtattgaaacaatttaatgaaaatattaaatatttggtttcaaaaggcagatttatcttctcccaacattctgttatttctgatacttttgaaaaactaataaaaactaataaaagaagcgtaaaaagtgagtttacatgttgaggaaaaaaatggcccaatatgctcatcactgataaatgctccctggccttaaaaactaccaacatataatatatatgctgtcttaaaagttaatgatccaagtggcacctctctgaacctactttggcttgggaggctgcccagttaaaacaaaaataagttaatggtacagaaagagaatgaaaaatgaaagcctccttttatcctatcatcctaattccttttcccagtaataatgactgctgtgttggattccttctgcaaataaaagtgtatacataaaa

SEQ ID NO: 354 - DNA, 9199 bp, Artificial Sequence
  PEX5L
gagaacggcgcgcgccccgctcggcagctgcggcggcggctggtgtaggcgctcacgtcagggctgggaggagggggttcgcagctcagagagagagagacatgaggcaacctggcaggaagcgagaaagagttcggcgaagaaggagtgagttctagagacgccccgcgagcaggacccgcgcctgcaggagagcctggccgacccggctcctcgccttctctgcgcgctctcccgcgtccgctttcagcaccccgagcggagaacagttcccggcagcccgcagcgctgccgagtggccgccggccggccgagtacccggagctccagggggctcaggagcaccctctgagaacccgctgtgcacccaccttttcccctcttttggtgggcaagtaagcacgggggaaaagcatccggtggcctcagggagccctgaagaaaccgaagcagaatgtaccagggacacatgcaggtagtaggtgtaaccttgaagaaaaagtggcactgtcttcaaaaaagtgacctgaccctggctttgggaaaaggctctagggcggcagataaggctgttgccatggtgatgaaggagataccgagggaggagtctgctgaagaaaagcccctccttactatgacatcacagctggtgaatgagcaacaagaaagcagacccctcctgagtccctccatcgatgactttctctgtgaaaccaaatcggaagcaatagcaaggccagtaacatccaatacagctgtattgaccactggcttagatctcctcgacctgagtgaaccagtctctcaaacccaaaccaaagccaagaagtcagagccctcatcaaaaacctcatccctcaagaaaaaggccgatggatctgacctcatcagcacggatgctgagcagagaggccagcctctcagagtcccggagacttcatccttagatctagacattcaaacacaactggaaaaatgggacgatgttaagtttcatggagatcgaaataccaagggacatccaatggcagagagaaaatcatcctcatctagaactggatcaaaagagctcttatggtcctcagaacacagatctcaaccagaactgagtggtggaaaaagcgccctcaactctgagtcggcttcagaattggaattagtggctccgactcaggctcgactgaccaaagaacatcgctggggaagcgcattactttctagaaaccactccttagaagaagagtttgaaagggcaaaagcagcagtggagtcagatacagagttttgggataagatgcaagcagaatgggaagaaatggctcggaggaactggatatctgagaaccaagaagcccagaaccaagtaaccatctcggctagtgagaagggatattactttcacactgaaaaccccttcaaggactggcctggagcatttgaagaaggcttaaaaaggctgaaggaaggggatctgccagtcaccatcctgttcatggaagcagcaattcttcaggaccctggagatgcagaggcatggcagttcctcgggataacccaggcggagaatgaaaatgaacaagcagctattgtcgccctccagaggtgcttagaattacagcccaacaacttaaaagctttgatggccttggctgtgagttatactaacactggccatcagcaggatgcctgtgacgctctgaagaattggattaagcaaaatccaaagtacaaataccttgtgaaaagcaagaagggatctccaggcctcacccggcggatgtctaagtccccagttgatagctctgttctggaaggggtgaaggaattatatctggaagctgcccaccaaaatggagatatgatcgacccagacctgcagacaggtctaggggttctgttccacctgagtggagaatttaatagagcaatagatgcatttaacgctgccttaactgttcggccagaggactattcactatggaaccgcctcggggcgaccttggcgaacggagaccgcagcgaggaagccgtggaggcctatacgcgagcactggagattcagccaggattcatccggtccagatacaacctaggaataagctgcatcaacctgggcgcctacagagaagcggtcagcaattttctcactgccctcagtttgcaaagaaagagcaggaatcagcagcaagttcctcatcctgcaatctctgggaatatctgggctgccctcagaattgcgctctctctgatggaccaaccagaactcttccaggcggctaatcttggtgacctggatgtcctcttaagagctttcaacttggatccttgaagaaagaataataccagtactaataatccctgatctgtgtgattgtactgaaaaatcaaaaactattttattatgaatttcaaaaggataaatcaaatattcaaaaggccatggtcatatagcccaaggaaattaattcctgtggacaatgcccagtctctgttcagatccaaaagcacaaaatgttgtatatagagtcaaagtcaggctcaaaagaagaattaagagactcaagacaaaccaagataaagtaactgtgtgttgaatactctttccacaagttgcaagcatattgcaacacatgttctttgggttttttgtctccccttgcagctgatgacacatctgaggaacttgttcatgggaaacatggaaaaagcactgcctcagattgggaaattctgactgtttctgaactgtcttcttttgcaagactgaacatagtttgggccattggtgcatgcacatatattaacttgtgactaaagacagacattgcttaaacctgttccaattttaacttttactgtagccctttgattccagagagggagctttgctggcaaaagcagtttttgcactagaaatttttgctgttcccaatctaaacttttctggtattgtatatatgcactttaatatcttatttatgccttgctggagttttgttttgttgctccaatttttaacttgggggtgaaagatttaagaactcagcctcactagatcaacggaccaaataaacaattcctgaagacagtttttcatagtgtaggattttgaagaagtgtttttcttaaagcagatacgatgacataaggcgtaaatatggcaaacagatcttttcattcacgtgctttctgggtctgtatgaacataagtaagacacaaggtactgtctcttcatgcattctctgcaggaagaaagtttgatggtatcgtgatttctattgagttcaaattaacttgcttaagtgtcatactttactggctttgccctgcacaccaatattccttttaaaccataaatattttaaataatatttcttaagagtgataaataacattttttcctaaaaattatgttttcttagtttcataataatctgcactgttcatccccttgcattctaagtgatagaagagcaacactttcaaaccaaatctcactgaatgccagtgatttcatatgaaagatgcatgcctctttggctctttgaacatttagcaagtattgggaattttctattagcagtggtgttttaattggttgaattccacttagttctccacagtgttttgtatgtgtttggggcttggtgattattttgaaagatacattttttaaagaattaggaacattttttgcaaaatgctaatcagaatataattttcccaatgtcaggtatagaagttatcccattcttctttacctggtctccttccttcgtctagaaccttccccacagtagctaatcctaacaactttttatttatgttctttgataataatagctcatcccgctcatgattatagctacccacaaaaaataaaacaacaacaacaaaaaagactccacagaattgggatcaaaacagtctaattggctggggaataagcttctactgaggagtaaatgtgcacacgtgcttatcaattgaatgcgaggtacaggaataaaatcctctcctctgttacatctgaagtccttgggttgtgagagggcctcaagttaacagaaaccacaagtccttgaggcttacatatgttataacctattctagtttataaagacaaaaagctgaggccactgtgaggagtgccaggttttgatagtcattgtcaaagttgacttgggccaggtggtagctccagctggtcagcagaaggcagaggcattcaggcactcatcatgggtagcagcgaccacccagtctcagaccgtgcttctctacagtctcagcagcaaagtaaagctcaacaatgctttcaagaatggtattgtaagaattgtagaattcgagaaacccagtctggtaaggactcttggggccagcctccaagccatggcagggcctgcttgaatatgcctgattaagcatcctttccttccctgctccttcctcctgccatctctgtaccttgaccagaaagtcggcatgaatagttcatggacaaaggattgaatagcctctgaacaaaggattcaaagcaaactttgtaagtgttctgtgatgccattctatactttgagcagcagctgaatctgcagcctggatttaaagcctgaaactagtataaatgtcaaataattaatttgttgctaaatggtggcaaattttgtggcccaagttttattttgctattggaacacaaactccaaggagctgttttagggaagactaaacaatcttccattcttaccattatttggcaatttgcagagcatttagtagtactttctctagtgtatgtagtatctgtcagatctaagatttttataggctgtcaagaagtccagaattacggcccaagaggaaaagagttgcatttttcaataatattttttataaaattaagttaaaaccattattaaaacatgagtgacaggccaggtgcggtggctcacgcctgtaatcctagcactttgggaggcagaggcgggcagaccacgaggtcaggagttcgagaccagcctgaccaacatggtgaaaccccgtctttattaagaatacaaaaattagccgggtgtagtggtatgcacctgtaataccagctactcaggaggctgaggcaggagaatcacttgaaccagggaggcggaggttgcagtgagccgagattgcaccgctgcactccagtctgggtgacagagcgagactccgtctcaaaaaaaacaaaaaagtgacagtttataggaatagagcaccaccaagaaatcagtagcaagactttagaacagtctttttgtataaatcatatacagtaaatgttttgtttcttagaagtgcatctactttattttttggcagaacaatttttggcatcttatcttcatggcatgaaattgtcatttaaattactctttccgtttgaaaggggagggtatccttatttcccttctgaggtactctgagaaggctttgagtttcctttttcatgtattaatgtataacagcctaacagctcctagaagagggtattcttactagaatggctacatacgggtgacttcagttacatacaggtgacttccagggactgacttcgcctgtagattggatgaaaataaagagaaagccagtgattattgctgagtttcaaaatataaccatttctagtaggctacttctacatgctgttgtaccttcctggtgaggaggagacagagggataggggagaggaggaggaataaaaatccctctcactgggccaatcatactgattcattccctttacttcctccaaaactcactccccatgactcctgaaaaatgggtagatctcgtccaccaggaaattttaatagaatactatgcaccgtgctttctcagtcaatctggattcctactagaacagaaaagtaaggaaacataactgggtaggaatgtccacttacgtttcacaaactcacttttagagtttcatgccactttcctcattcttctctttaagatactattatattgaacgtgggacccatgtctaaatacttgtatagataaatatttcttgtatattcttcccatacaagcaagacttgaatacagttgtagctagtcccacttttataataaaagcttccaaactctttatcataaactttgtctgtgagcttgggaatacagagaaagcaagttgatcattctgagacccttcctcatttgccctgaatcagttccccaagattggactgtactttaagctagttgttgtagcagtggtggttgttgttttatatcttgagatacttctagaacattctagaaacagggtattctaaaggcttactttatatgccatcctttttgaaccctcttattttagaaattattacacgtgcacacttatgatttcaaccttgtaaaataatttcaaattcatttcgtatccacattttactgcagtttccctatcatcatctcaatagttatagaactggttgaaattaaactgttttgaactaagaagtagatatatatatatatatatatatatatttttttttttttttttaaagagtgttcatagataaactctggcataaagtttgtaaaaaagcaattttttaaaagcaaaacgtataacctcaggtacaaaaatattgcatgcattagtattgcaaatttgcctactcaaatattaaccaaagcatgcaagataacttgactgaatttaaatttacacagtgcatgattaagtctcataggttagcctgttgttccttgcctctatacaagggagcatttttatgaactttgtgttacagtttttctatttgcttttcttatcctatccttgagattgttttcatgctatcacactgaactttacagatattcacacatctggtttctacagtgttaccagtgccaaactaatcctctgaagaatctgggacatctaaacactttttcaaaaaccagttgaggcacaacagatcccaaacttaaacaaatccaagtgtctgaatgctactaaactaaatcatgttgactgcctcagcacataaaggtttcgactttaaattcttaataatgcatttcaaaatttttctaaaagtttgggaataaattagaaaaactgatattctaaataaggcgaggaggttggggtaatgtcaggcacatcaaaatcatcacacaacgaagtagatatggggccttaattttcataaatgtcacatagcaagtgtgtggggtatcacaacattgttctgatacagccctgtttgtatggtagttgagctgcttgggctaaatgtcccttgagaaactggacttgatcaacaggtctaaaaacactgatatttagggagtgatgaggtgatttcacggtcactcagaaccaactctgaaatcttctcactgccttttcccataacccctattttatgaggagaccagaaagggagagagcaaagctcagtgagaccatgtggtcttacattagtaacagctttgttactcactccatataccccggtaccctcacacacataccatgaactcaaagacagaattctacacataacacacatagcaaagacgattgtggggaggcattaaacagttaagaggaaaaaaaaaaacacagaaaattaaactgtgaggtttaacaacctctcatgtggtattttgccttgaacgaagtttccactacctgcagcttctgcagaaataccaaaataacacagtctagagacaagtgtcccaatgtcagaactgttttctcaggaccttctctataagagaaaactaacttgcaatgctgcagaatgtcagagcaaaaccctgatgagctccgtgggatacttaatagaagcctgcactcaaaataatattaagatggaaacaacaacaacaattaggcagttctttgctcaactataaaatgtgtatcattcattgggggagggggaggggtcgtgttctttggatttcttggaaagggaaatggtataacacaaaaagactaagaggtatacacactcagctcggtaattcgagcatttggcattttcactgagatatatagcatttctgcatggataccatacaagaattctgccatgtgagaaatgtgttcatgatggactacattaccagtagttaagggaaatacagcaaacttaagtttttaccaacttcctttcatgttccctatatatcatctaacccaaactttcaatttacattgcccaaatttgtttacattggttgaaaaaaaactgattaatttattaaactttttacaaactgtaacaaacatttaactatttagaaaagacatttctacatattttatatatctatgaatattgcatctctaatctaatctaaaaatgttgttttgagacaattcttctgtgatgcttcctcctcatgctcataaatgtttaaagtcttgggatttcattttcaggctgaaatagataacaagaaaaaaatttaagtttaaatgtttacattgcgttactaaattaataccaattcaaattaagtgacctatagtaaattaatggcaatgggggggaggggattttaaagtgattggcatattatgtgatactgtatcagtgatttagtgaaataatatgtatcatagcacaactctgttgggtattaaggcttcatcttagtatttccctgcgttgctctttgaaataaaattactaccataaaaataacctcttatcatattgatgtgtttaatttactcagttggcttctaatttgcgtaacaagattaaggtagtatttttgtactattattggaagcatgccttccctttttcacattattaaattgtatttatatttgtgcaattttaaactatgttttcaaataaactttgtctgcggcttcgaggtcttttcaggaatctttcaaaatgggatttggggatcagaactccttctgatcaaatggaatccaatttgtactactggctaaaggtccttttattaaatattgaatatcactacatatgattttgcatgagctatctggaaatcaggaatgcatttttggatataaaacaaaactttaaaaatcttcctcctttgttaattttttaagactaaaatattatttaacctgaaattgaattttgtgattctttttagaataaaaatattaaaataaa

SEQ ID NO: 355 - DNA, 32759 bp, Artificial Sequence
  TTN
gagcagtcgtgcattcccagcctcgcctcgggtgtagggattgcatagaaaagcaaaactacacagtcttgactgtgtagttttgtttttaggattagaggctcaccgattcatgtcggagatggtcagaaaaaccaactctccataggacgtcgtttcagaagcaaccttgggcttagtcccaccctttttaggcactcttgagaaatcagagtgcctagaaagatgacaactcaagcaccgacgtttacgcagccgttacaaagcgttgtggtactggagggtagtaccgcaacctttgaggctcacattagtggttttccagttcctgaggtgagctggtttagggatggccaggtgatttccacttccactctgcccggcgtgcagatctcctttagcgatggccgcgctaaactgacgatccccgccgtgactaaagccaacagtggacgatattccctgaaagccaccaatggatctggacaagcgactagtactgctgagcttctcgtgaaagctgagacagcaccacccaacttcgttcaacgactgcagagcatgaccgtgagacaaggaagccaagtgagactccaagtgagagtgactggaatccctacacctgtggtgaagttctaccgggatggagccgaaatccagagctcccttgatttccaaatttcacaagaaggcgacctctacagcttactgattgcagaagcataccctgaggactcagggacctattcagtaaatgccaccaatagcgttggaagagctacttcgactgctgaattactggttcaaggtgaagaagaagtacctgctaaaaagacaaagacaattgtttcgactgctcagatctcagaatcaagacaaacccgaattgaaaagaagattgaagcccactttgatgccagatcaattgcaacagttgagatggtcatagatggtgccgctgggcaacagctgccacataaaacacctcccaggattcctccgaagccaaagtcaagatccccaacaccaccgtctattgctgccaaagcacagctggctcggcagcagtccccatcgcccataagacactccccttccccggtcagacacgtgcgggcaccgaccccatctccggtcaggtccgtgtctccagcagcaagaatctccacatcccccatcaggtctgttaggtctccattgctcatgcgtaagactcaggcatccaccgtggccacaggtcctgaagtgcctcccccttggaagcaagagggctacgtggcctcctcatctgaggctgagatgagagagacaacgctgacaacctctactcagatcaggacagaagagagatgggaagggagatacggtgtccaggagcaagtgaccatcagtggtgctgcgggtgctgccgccagtgtgtcggccagtgctagctacgcagcagaggctgttgccactggtgctaaagaggtgaaacaagatgctgacaaaagtgcagctgttgcgactgttgttgctgccgttgatatggccagagtgagagaaccagtgatcagcgctgtagagcagactgctcagaggacaaccacgactgctgtgcacatccaacctgctcaagaacaggtaagaaaggaagcggagaagactgctgtaactaaggtagtagtggccgccgataaagccaaggaacaagaattaaaatcaagaaccaaagaagtaattaccacaaagcaagagcagatgcacgtaactcatgagcagataagaaaagaaactgaaaaaacatttgtaccaaaggtagtaatttccgcagctaaagccaaagaacaagaaactagaatttctgaagaaattactaagaaacagaaacaagtaactcaagaagcaataagacaggaaactgagataactgctgcatccatggtggtagttgccactgcaaagtccacaaaactagaaacagtcccgggagctcaagaagaaactaccacacaacaagatcaaatgcacctaagttatgaaaagataatgaaggaaactaggaaaacagttgtacctaaagtcatagttgccacacccaaagtcaaagaacaagatttagtatcaagaggtagagaaggcattactaccaaaagagaacaagtgcaaataactcaggagaagatgagaaaggaagccgagaaaactgccttgtctacaatagcagttgctactgctaaagccaaagaacaagaaacaatactgagaactagagaaactatggctactagacaagaacaaatccaagttacccatggaaaggtggacgttggaaaaaaggctgaagctgtagcaacagttgttgctgcagtagaccaggcccgagtcagagagcccagagagcctgggcatcttgaagaatcctatgctcagcagaccactttggagtacggatataaggaacgcatttccgccgcaaaggtagctgagcctccccaacgtccagcctcagaaccccacgttgtccctaaagcagtcaagcctagagtaatccaggctccttctgagactcatatcaaaactactgatcaaaagggaatgcacatatcatcacagatcaagaaaactacagatctaacaacggaaagattagtccatgtggataaacgcccccgcacagctagccctcactttactgtttcaaaaatttctgttcctaagacagaacatggatatgaggcatcaatagccggtagtgctattgccacattacaaaaagagttgtcagccacatcttctgctcagaagatcaccaaatcggtgaaggctcctactgtgaagcccagtgagactagagtaagggcagagcccacacccttgccacagttccccttcgctgacacaccagatacttacaagagtgaagctggcgttgaggtgaaaaaggaagtaggggtgagcatcactggcaccaccgtccgtgaagagcgctttgaagtactgcacggacgcgaagccaaggtaacagaaacagcaagagtaccagcacctgttgaaattcctgttactccaccaactttggtctcgggcttaaaaaatgtgactgtcatagaaggtgaatctgtcaccttggagtgccacatctctggatacccatccccgacagtgacatggtacagggaagactaccaaatcgaaagttccattgacttccagataaccttccagagtggaattgctcgtcttatgattcgcgaagcatttgcggaagacagcgggcgatttacttgcagtgctgtaaatgaggctggaaccgtcagcacatcctgctatctggctgtgcaggtgtcagaagaatttgaaaaggaaaccacagccgtgactgagaaatttactacagaagagaaacgctttgttgagtcaagagatgtggttatgactgatactagcctcacagaggaacaagcagggcctggagaacctgccgcgccttactttattacaaaaccagtggtccagaaactggtggaaggtgggagcgtggtgtttggatgccaagttggcggcaacccaaagccccatgtatactggaaaaaatctggtgttcctctaaccactggatacagatacaaagtgagttacaacaaacaaaccggtgaatgcaagctggtgatttctatgacttttgctgatgatgctggagaatacactattgttgttcgcaataagcatggagaaacttctgcatctgcttccttgcttgaagaagctgattatgagttactgatgaagtcccagcaagaaatgctttatcagacacaagtgactgcatttgttcaagaacctaaagttggagaaacagcacctggatttgtatactctgagtatgaaaaagagtatgaaaaagaacaagccttaattaggaagaaaatggccaaagatactgtagtggtcagaacttatgtagaagatcaggaattccatatttcttcctttgaagagagacttattaaagaaattgaatatagaataataaagactacattagaagaacttcttgaagaagatggagaagaaaagatggcagttgacatttctgaatctgaagctgttgaatcaggatttgattcaagaatcaagaattatagaattcttgaggggatgggtgtcacttttcattgcaagatgtctggatatccattaccaaagattgcttggtacaaagatggcaagcgcatcaaacatggagaaagataccaaatggactttctacaagatggcagagctagtctgcgtatacctgttgttcttccagaagatgaaggaatctacactgcatttgccagcaatattaaaggaaatgcaatttgctcagggaaattgtatgtggagcctgctgcaccacttggagctccgacttacattcccacactagagccagtgagcagaatcagatctctctctccacgttcagtgagcaggtctcctatacgcatgtctcctgcacggatgtcacctgcaaggatgtctcctgcacggatgtcccctgcaagaatgtcccctggacgtaggctggaggagacagatgagtcacaacttgagagactatataaaccagtctttgtgttaaaacctgtttctttcaaatgtttagaagggcaaactgccagatttgacttaaaggttgttggtagacctatgccagagacgttctggtttcatgatggccagcaaattgtcaatgactatacccataaagtagtcattaaagaagatggtactcaatcactaattattgtccctgccacacccagtgattctggggaatggactgtggttgcccaaaacagggcaggcagatcttcaatttcagtgattttaactgtggaagctgtggaacatcaggtaaaaccgatgtttgtagaaaaactgaaaaatgtcaatataaaggaaggttcccgacttgaaatgaaagtcagagctacgggtaaccccaaccctgacattgtatggttgaaaaacagtgacatcattgtgcctcataaatatcccaaaatcagaattgaaggaaccaagggagaagctgcccttaaaatcgattccactgtcagccaagattctgcctggtatactgcgactgctattaataaagctggcagagacactacaagatgcaaagtaaatgttgaagttgagtttgcagagcctgagccagagagaaagttaatcatcccacgggggacatatagagcaaaggagattgcagccccagaactggagcccctccatttgcgatatggccaagagcaatgggaagaaggtgatctctatgacaaagagaaacaacagaaaccatttttcaagaaaaaactcacttccttaagacttaagcgctttgggcctgcccactttgaatgcaggctaacacccattggtgacccaacgatggtggtggagtggctccatgatggaaagccacttgaagcagccaacaggctccgtatgatcaatgaatttgggtactgcagccttgattatggcgttgcatattctagagacagtggtatcattacttgcagagccactaacaaatatggaacagatcacacatctgctacccttattgttaaagatgagaaaagtcttgtggaagaatcccaattgcctgaggggaggaaaggcttacagagaattgaagaattagagagaatggctcatgaaggtgcacttacaggtgtaacaacagatcagaaagaaaagcaaaagccagacattgtcttgtacccagagccagttagagtacttgaaggggagactgcaaggttccgctgcagggtaacaggctaccctcagcccaaagtcaactggtacctcaatggacagctcatccgcaaaagcaaaaggttcagagttcgctatgatggtatccattacctggacatcgtggactgcaaatcatatgacacaggtgaagtgaaggtcaccgcggaaaatcctgaaggtgtgatagagcataaagtgaagcttgagattcaacagagggaagattttaggtctgtccttaggagagctcctgaaccaaggcctgagtttcacgtacatgaaccaggaaagcttcagtttgaagtacaaaaagtggatagacctgttgacaccactgaaaccaaagaagttgtgaagttgaaaagggctgaaagaattacccatgaaaaagtgcctgaagagtcggaagagctgcgcagtaaattcaagcgcagaacagaagagggctattatgaagccattaccgctgtggagctcaagtctcgaaagaaggatgaatcctatgaggaactcctcaggaagacaaaagatgaacttctccactggaccaaagagttaactgaagaggaaaagaaagctcttgccgaagaaggcaaaatcacgattccaacttttaaacctgacaagattgaactaagtcctagtatggaggctccaaaaatcttcgaaagaatccagagccaaacagtgggccaaggatctgatgcacacttccgggtcagagtcgtggggaaaccagaccccgaatgtgaatggtacaaaaatggtgtcaaaattgaacggtctgaccggatctactggtactggcccgaagacaatgtttgtgaattggtcataagagatgtgactgctgaggactctgccagcatcatggtaaaagccatcaacatagctggagaaacctccagtcacgcattcttacttgtccaagccaagcaattgatcactttcacacaggaattacaagatgttgttgctaaggaaaaagacactatggcaacctttgaatgtgaaacttcagaaccatttgtcaaagtgaaatggtataaagatggtatggaggttcatgagggagataaatacaggatgcactctgacagaaaggttcacttcctctccatactgaccattgatacgtctgatgctgaagattacagctgtgtacttgtggaagatgaaaatgtcaaaacgactgctaaacttattgttgaaggtgcagttgttgagtttgtgaaagaacttcaggacatagaagttccagaatcatattcaggagaattagagtgcattgtatccccagaaaatatagaaggaaaatggtatcataatgatgtggagcttaaatccaatggcaaatatacaattacatctcgtcgtggacgtcagaacctcacggtcaaggatgtaaccaaggaggaccagggagaatacagctttgtcatcgacgggaaaaagacaacctgtaaattaaagatgaaaccccgccccattgctatcctacaaggacttagtgaccaaaaagtctgtgagggtgacattgttcagcttgaagttaaagtctccttggaaagtgtggaaggcgtctggatgaaagacggccaagaagtgcagcccagtgacagggttcacattgtgatagacaaacaatctcatatgctgctcattgaagacatgactaaggaagatgctggaaattactctttcaccattccagcccttggcctctccaccagtgggcgtgtctctgtctatagtgtggacgtgataacacctctaaaagatgttaatgtgattgaaggcaccaaggctgtgcttgaatgtaaggtgtcagtccctgatgtgacttctgttaagtggtacttaaatgatgaacaaatcaagcctgatgaccgtgtacaggccattgtgaaaggtactaaacagcgactagtcattaaccgaactcatgcttcagacgaaggaccttacaagctgatagttggcagagttgaaaccaactgtaatctctctgtagaaaaaattaaaattatcagaggtcttcgtgaccttacctgtacagaaactcaaaatgtggtgtttgaggttgagctgtcccactctggaattgatgtcctgtggaattttaaggacaaggaaatcaagcccagttctaaatataaaattgaagcacatggaaaaatatataaattgacagttctaaatatgatgaaagatgatgaaggaaaatacacattttacgcgggagaaaatatgacatctggaaaacttactgtggcaggtggggccatctccaagccactcacagatcagaccgtagctgaatcccaggaagctgtgtttgaatgtgaagttgccaacccagattccaaaggcgaatggttgagggatggcaaacacctaccactgactaacaacatcagaagtgagtctgatggccacaaaaggagacttatcattgctgccaccaaattagatgacattggagaatatacctacaaggtggccacctccaaaacatctgccaaactcaaagttgaagctgtcaaaattaagaagactctgaagaacctcacagtgacagaaacacaggatgctgttttcactgtcgagcttacacaccctaatgtcaaaggtgtccagtggatcaaaaatggagttgtgctggaatccaatgaaaagtatgctatctctgtcaaaggaacaatttactctctgaggattaaaaactgtgccatcgtggatgagtctgtttatggcttcaggcttggaaggcttggagccagtgccagactgcacgtggagactgtcaagatcattaaaaagccaaaggatgtgacagccttggaaaatgccactgttgcctttgaagttagtgtttcccatgacactgttccagtaaaatggttccataagagtgtggaaattaagccaagtgacaaacacagactggtctcagaaaggaaagtccacaagctgatgctgcagaacatctccccctcagatgctggggaatacacagctgtggtcgggcaattggaatgcaaagcaaaactgtttgtggagacattacatattacaaaaaccatgaaaaatatcgaggtgcctgagaccaaaactgcctcttttgagtgtgaggtgtcccacttcaatgtcccttccatgtggctgaagaatggtgtggaaattgagatgagtgaaaagttcaagatagttgtgcagggaaaactccatcagctgatcatcatgaacaccagcacagaggactcggcagaatacacatttgtctgtggcaatgaccaagtcagtgccaccctgacagtcaccccaatcatgattacttccatgctgaaagacatcaacgctgaagaaaaagacactattacttttgaggtgacagtgaactatgaaggcatctcttacaaatggttaaagaatggtgtggaaatcaaatcaactgacaagtgccagatgagaaccaaaaagctcacacactcactgaacatcaggaatgttcactttggggatgctgctgactacacctttgtggctggaaaagcaacatcaacagccacactttatgtggaagctcgtcatatagaatttaggaaacacattaaggacattaaggtactggagaagaagcgagccatgtttgaatgtgaagtttctgaacctgacatcactgtacagtggatgaaagatgaccaggaactgcagatcacagacagaataaagattcagaaggagaaatatgtccaccgccttctgatcccatccacccggatgtctgatgctgggaagtacacagtggtggcaggaggcaacgtgtcaactgcaaaactctttgtagaaggcagagatgttcgcatccgaagtattaaaaaggaggttcaggtcattgagaaacagcgtgctgttgttgaatttgaggtcaatgaagacgatgttgatgcccactggtataaagatggcattgaaatcaatttccaagttcaagaacgacacaaatatgtagtggaaagaagaatccaccgaatgtttatctctgagaccagacagagcgatgcaggagaatacacctttgtggcaggaaggaacaggagttctgtcactctctatgtcaatgctcctgaaccgccccaagttctgcaggagctccagcctgtcactgtgcagtctggcaagcctgcccgcttctgtgccgtgatatccggaagaccacagcccaaaatttcctggtacaaggaagagcagctgctttccactggcttcaagtgcaaatttcttcatgatgggcaagaatacacgcttttgctaattgaagccttcccagaggatgcggcagtctatacctgtgaagccaagaatgactatggtgttgccacaacatcagcttcactctcagtggaagttccagaagttgtgtctcctgatcaggaaatgcctgtttatccacctgccatcatcaccccgcttcaggacactgtcacttctgaagggcagccagcccgttttcaatgccgggtttctggaacagatctaaaagtgtcgtggtacagcaaagacaagaaaatcaagccatctcggttctttagaatgactcaatttgaagacacttatcaactggaaattgccgaagcttatccagaagatgaaggaacttacacgtttgttgctagtaatgctgtaggccaagtatcaagcacagccaacctgagtctggaagctcctgaatcaattttgcatgagaggattgaacaagagattgagatggaaatgaaagagttttctagttcttttctgtctgccgaggaagaaggacttcatagcgccgaacttcaattatctaaaataaatgaaacacttgaacttttgtctgaatctccagtttacccaactaaatttgattccgaaaaggaaggcactggcccaattttcatcaaagaagtgtcaaatgctgatataagcatgggggatgtggctacactgtctgtaactgtcattggcatccccaaacctaaaattcagtggttctttaatggagtgctattaaccccttctgctgactacaaatttgtttttgacggtgatgatcatagcctgatcattctgttcaccaaattggaggatgagggagagtatacatgtatggccagtaatgactatggaaagacaatatgtagtgcctatctaaaaattaattccaaaggagagggtcacaaagacactgaaacagaatcagcagtggcaaaatctctggaaaagctgggaggtccttgtcctcctcacttccttaaggagttaaaaccaattcgctgtgctcaagggcttcctgccatctttgagtacacagtggttggagagcctgcccctactgttacatggttcaaagaaaacaagcagctttgcaccagtgtttattacactatcattcataaccctaatggctctggaactttcattgtcaatgaccctcagagggaagacagtggcctctatatctgtaaagcagagaatatgttgggtgagtccacctgtgcagcagagctgcttgtgcttctggaagacacagacatgactgataccccctgcaaagcaaagtccacaccagaggctcctgaggattttccacagacacccttaaagggtcccgcagttgaagcacttgactcagagcaggaaattgcaacgtttgtaaaagacaccattttgaaagctgctttaattacagaagaaaaccagcaactatcttatgagcatattgctaaagccaatgaattgagcagtcagcttcctttgggagctcaggaattgcaatccattttggagcaagacaagctcactcctgaaagcaccagggaatttctttgcatcaatggcagtattcactttcagcctctcaaggaaccatctcccaacctacagctgcagattgtacagtcccagaaaaccttctccaaagaaggtattctaatgcctgaagagcctgagacacaggcagttctatcagataccgagaaaatcttcccaagtgccatgtccatagaacaaattaattcattaacagttgagcctctgaaaactttattagctgaacctgaagggaattatccacagtcttcaatagaacctccaatgcattcttatctaacctctgtggctgaggaagtactttcaccaaaagaaaagacagtatctgacaccaacagagagcaaagagtgactcttcaaaagcaagaggcacaaagtgcgctcatcttgagtcagagcttagctgagggacacgtggagagtctccagagtcctgatgtcatgatctctcaggtaaactatgagcccctagtcccttcagaacactcatgcacagaaggaggtaaaattttgatagaaagtgcaaatccactggaaaatgcagggcaagattctgcggtcagaattgaggaaggcaagtccttaagatttccactagcacttgaagaaaagcaggtactgctcaaagaagagcattctgacaacgtggtgatgcccccagaccaaatcattgagtctaaaagagagcccgtggcaataaagaaagtgcaggaggtacagggaagggaccttctttctaaggaaagcttgctttctggtattccagaagagcagagattaaacctgaaaattcaaatctgccgggctttgcaagcagccgtggccagcgagcagccaggtcttttctctgagtggctaagaaatattgaaaaggtggaggtcgaggctgtaaacatcacccaagagcccagacacatcatgtgcatgtaccttgttacttcggcaaagtctgtaacagaagaagtaaccatcattattgaagatgttgatcctcaaatggctaacctgaaaatggaacttagggatgctttgtgtgctattatatatgaggaaatagacatcctaacagctgagggtcctagaattcagcaaggagccaaaacaagtttgcaagaagaaatggattctttttcaggttcacagaaggttgaacccattactgaaccagaagttgaatctaaatatctgatctcaactgaagaggtcagttattttaacgtgcaaagtagggttaaatatttggatgccacacctgtcactaaaggggttgcttcagctgttgtctctgacgaaaaacaagatgagagtctgaaaccatcagaggaaaaagaggagtcttcctctgaaagtggtactgaggaggttgctacagtaaagatacaggaagctgagggtggcttaatcaaagaggatggccccatgatacatacacctttagtggacactgtttctgaggaaggtgatattgtacacctcacaacatccataacaaatgctaaagaggtgaattggtattttgagaataaactggtgccttcagatgaaaagttcaagtgtttacaagatcaaaatacatatacgctagtcatcgacaaagtaaataccgaagaccatcaaggagagtatgtctgtgaggccttgaatgacagcggaaaaacagcaacttcagccaaactcactgtagtaaaaagagctgccccagtgatcaagaggaaaatcgaacccctggaagtagcactgggccacctagccaaattcacctgtgagatccaaagtgctcccaatgtccggttccagtggtttaaagctggccgagaaatttatgagagtgacaagtgttctattcgatcttcaaagtatatctccagccttgaaatcctgagaacccaggtggttgactgcggcgagtatacatgcaaagcttccaatgagtatggcagtgtcagctgtacagccacactaactgtgacagaggcatatccaccaacctttctctccagacctaagtcccttacaacttttgtgggtaaggcagccaagttcatctgcacagtgacagggactcctgtgatagaaaccatttggcagaaagatggtgctgcactctcaccttcacctaactggaggatttccgacgcagaaaacaaacacattttagaactctcaaaccttaccattcaagatagaggagtttattcttgtaaggcttccaacaagtttggagcagacatctgccaagcagagttgatcatcattgataagccacatttcattaaagaattagagcctgtgcagtccgctatcaataagaaggtccaccttgagtgccaagtagatgaagacagaaaagtcacagttacgtggagcaaagatgggcaaaaactccccccagggaaagattataagatctgttttgaagataaaatagcaacacttgagattcctttggccaaactgaaagattcaggaacctatgtctgtacagcttcaaatgaggctggaagcagctcctgctcagccacagtcactgtcagagagccaccatccttcgtgaagaaggtggatccctcttatttaatgctcccaggtgaatcagcacgcctccattgcaagctgaaaggctcacctgtgatccaggttacttggtttaaaaataacaaagaactcagtgaaagtaacacagtccgaatgtattttgtcaattctgaggctatacttgatattacggatgtaaaagttgaagacagtgggagttactcatgtgaagcagtgaatgacgtcggcagtgatagctgcagtactgaaatagttatcaaagaacctccttctttcatcaaaactcttgagcctgcagacatagtgagaggaacaaatgctctacttcagtgtgaagtctcaggcactggaccatttgaaattagctggttcaaagacaagaaacaaattcgaagtagtaaaaaatacagattgttttctcagaagtctcttgtgtgtctggagatcttttcgtttaatagtgcagatgttggtgaatatgaatgtgttgttgctaatgaagtcggcaagtgtggctgcatggcaacccacttactcaaagaacctccaacctttgtaaagaaagtagatgatttgattgcactaggaggacaaaccgttaccctgcaagctgctgtgagagggtcagagcccatttctgtcacatggatgaaaggtcaagaggtcatcagagaagacggaaaaatcaaaatgagcttttccaatggtgttgcagtcttgataatccctgatgttcagattagttttggaggcaaatacacgtgcctggctgaaaatgaagctggaagccaaacatctgttggggaattaatagttaaagaacctgccaaaatcattgagcgagcagaactgatccaggtgacagcaggagatcccgccacactggagtacacagtggcaggcacgccagaactgaagcccaaatggtacaaagatgggagacccttggtcgccagtaaaaaataccgaataagttttaaaaacaatgttgcccagctcaaattttattcagctgagctgcacgacagtggccaatacacatttgagatttccaatgaagtgggcagcagctcctgtgagactacattcactgtattagatcgagacattgctccattttttaccaaacccttgcgcaacgtggatagtgttgttaatggtacctgcagactggactgcaaaattgcaggctccctccccatgagggtgtcctggtttaaggatggcaaagaaatagctgcttctgacagatacaggatagcatttgtggaaggcacagcctctttggagatcatcagagtagacatgaatgatgcagggaatttcacttgtcgagccacaaattccgtgggaagcaaagacagcagtggagccctgattgtgcaagaaccacccagttttgtaactaaacccggctcaaaggatgttctgcctggctcagcagtctgcctgaagagcactttccaaggatctactcctctcacaatcagatggtttaagggcaacaaagagctggtttctggtggaagctgctatattaccaaagaagctttagagagttccctggaactctatttagtaaaaacctctgattcgggcacgtacacatgtaaagtcagcaatgtcgctggaggggtggaatgcagtgcaaacttgtttgtaaaagaacctgccacatttgttgaaaagttagagccatcacagctgttaaagaagggagatgccacccagctagcctgcaaagtaactggtacccctccaattaaaataacatggtttgcaaatgatagagaaattaaggagagcagcaaacacagaatgtcttttgtggagtctactgcagttctaagactgacagatgttggcatcgaagacagtggtgaatatatgtgtgaggcccaaaatgaggctggcagtgaccactgcagtagcattgtaatagtcaaagagtcaccttattttaccaaggaatttaagccaattgaagtcttaaaggagtacgatgtcatgttgctggctgaggtggcaggcactcctccctttgagatcacttggttcaaagataacacaatcctgcgaagtggtagaaagtataagactttcattcaggatcatctggttagcctgcagatcctcaagtttgtagctgcagatgctggcgaataccagtgtcgggtgaccaatgaggtgggcagcagcatctgcagtgccagggtgactttaagagaacccccatccttcataaagaagatcgagagtaccagctccctccggggaggcacagctgccttccaggccactctgaagggctccttgccaattacggtgacttggctaaaagacagcgatgaaatcactgaagacgataatataagaatgacctttgagaacaatgtggccagtttgtacctcagtggcattgaagtcaagcatgatgggaaatatgtctgtcaggccaaaaatgatgcaggaatacaaagatgttctgcattactctcagtaaaagaacctgcaacaatcaccgaggaagctgtgtctatagatgtcacccaaggagacccagccactttgcaggttaaattttcagggactaaggagattacagccaaatggtttaaagatggccaagaactgaccctgggctcaaaatataaaatcagtgtcactgatacagtctcaatactgaagattatttctacagaaaagaaagatagtggagaatatactttcgaggtccaaaatgatgttgggaggagcagctgcaaggctagaattaatgtattagatcttatcatacctccttcattcaccaaaaagctgaagaaaatggacagcattaaaggttctttcattgatttagaatgtatagtggctgggtcacatcccataagcatccagtggttcaaagatgaccaagaaatatcagctagtgaaaagtacaaattctcttttcatgacaatactgccttcttggaaatcagccagctggaaggtacagacagtgggacatacacttgttctgccacaaataaggcagggcacaaccaatgcagtgggcatctgacagtcaaagaacccccttactttgtggaaaagccacagtcacaagatgtcaatcccaacacaagggtacagttaaaggctcttgtgggtggcactgcacccatgacaataaagtggtttaaagataacaaagagttacactcaggagcagcccgctcagtttggaaggatgacacctctaccagtctagagctctttgcagccaaagctaccgattctggaacctacatttgccaactaagcaatgatgttggcacagcaaccagcaaagccactctctttgtaaaagaacctcctcaattcattaagaagcccagtccagtcttagtgctgaggaatggacagtcaacaacatttgaatgccaaataacaggcactcctaaaatccgagtgtcttggtatctagacgggaatgaaataacagccattcagaaacatggcatttccttcattgatggtttagccactttccagatttctggtgccagggtagaaaatagtgggacttatgtgtgtgaagctcgaaatgacgcaggcacggcgagctgcagcattgaactcaaagtgaaagaaccccccacctttatcagagagctgaagcctgtggaggtagtaaaatatagtgacgtggagctggagtgtgaagttacgggaacacctccgtttgaagtcacttggctgaagaataacagggaaattcgaagcagcaaaaaatacacattgaccgacagagtgtctgtgtttaacctccatataaccaagtgtgacccttcagacactggggaataccagtgcattgtatccaatgaaggcggcagctgctcatgcagtactagagttgccctgaaagaaccaccatcattcattaagaagatagaaaataccactactgttttgaaaagttctgccacctttcagagtaccgtggcaggttctcctcctatttctataacctggctaaaggatgatcagattcttgatgaagatgataatgtctatatttcatttgtggacagtgtggccacacttcaaatcagaagtgtggataatggacacagtgggagatatacctgtcaagccaagaatgagtcaggagttgagaggtgttatgctttccttttagtacaagaaccagctcaaatcgtagagaaagctaaatcagttgatgttacggagaaagatcccatgaccttggaatgtgttgtggctggaacaccagaactcaaagtgaaatggcttaaagacgggaaacaaatagttcccagtagatacttttcaatgagttttgaaaataacgtggccagttttagaattcagtcagtaatgaagcaggacagcggtcagtacactttcaaggtggaaaatgacttcggaagcagtagctgtgatgcctacttaagagtgctagatcaaaatattcctccatcattcaccaaaaaattaaccaaaatggataaagttctgggctcttctattcatatggagtgcaaggtgtctggttcacttcccattagtgctcagtggtttaaggatggaaaagaaatatctacaagtgcaaaatacagacttgtgtgccatgagagatctgtgtctctggaagttaataatctggaattagaagatactgcaaattacacatgcaaagtgtcaaatgtagcaggagatgatgcatgcagtggcatcttaactgtgaaagaaccaccaagcttcctagtgaaacctgggcgacagcaagccatacctgattctacagtggaatttaaggcaatactaaaaggaacaccaccatttaaaataaaatggtttaaggatgatgtggaacttgtctcaggtcctaaatgtttcattggcttggaagggtcgactagcttcttaaatctctactcagtggatgcttctaagactggacagtatacttgccatgttaccaatgatgttggtagcgactcttgtactacgatgttgcttgtgacagaaccaccaaagtttgtaaagaaattagaagcctccaaaattgtgaaagcaggtgactcttcacgacttgaatgcaagatagctggatccccagaaatcagagttgtgtggttccgaaatgaacatgaacttccagccagtgataagtacagaatgactttcattgactcagtggccgtcatacagatgaacaatctcagtactgaggacagtggagatttcatttgtgaggctcagaatcccgctggcagcacaagctgcagtaccaaggttatagtaaaagagccacctgtttttagcagcttccctcctatagtagaaacccttaaaaatgctgaagtcagtcttgaatgtgaactttcgggaacaccaccgtttgaggtggtatggtacaaagacaagcggcaactcagaagcagcaagaaatacaagattgcatccaaaaacttccacacaagtattcacattctcaatgtggacacttcagacatcggtgaataccactgcaaagcacagaatgaagtgggaagtgatacttgtgtttgtactgtaaaattgaaagaaccaccaagatttgtctccaaactgaacagcctcactgttgtagccggagagcctgctgaattacaagcatccatagaaggcgcccagcctatttttgtccagtggcttaaagagaaggaagaagtgattagagaaagtgaaaacatcaggattacatttgtggaaaatgttgcaactctacagtttgcaaaagcagagccagctaatgctggaaagtatatctgccaaatcaagaatgatggtggaatgagggagaacatggccacactgatggtcttagagcccgcagtcattgttgagaaggcaggaccgatgacggtgactgtaggagaaacgtgcactctggagtgtaaggtggctggcactccggaactctctgttgaatggtacaaggatggaaagctgttgaccagcagccaaaaacacaaatttagcttctacaacaaaatctcttccttaaggattctctcagttgaaaggcaagatgcaggcacatacactttccaggttcaaaataatgttgggaaaagcagctgcacagctgtggttgatgtttcagaccgagcagttcctccctctttcacacgaagactgaaaaatactggtggggtgttaggtgcttcttgcatcttggaatgcaaagtagctggatcatcacctatttcagttgcctggtttcatgagaaaaccaagattgtcagtggagcaaagtaccaaaccacattttcagataatgtctgcacattgcagttgaattctctggattcctcagatatgggcaattacacatgcgtggctgctaatgtcgctgggtctgatgaatgtcgtgcagtgctaactgtacaagaaccaccctcttttgtgaaagaacctgaacctttggaagtactaccaggcaaaaatgtaaccttcacaagcgttattagaggaacccctccattcaaagtcaactggttcagaggtgccagagaactagtgaaaggagaccggtgcaacatctattttgaagacactgtggcagaactggaattatttaatattgacatatctcagagtggggaatacacctgtgtggtttctaacaacgctggccaagcatcttgcactacccgtctctttgtgaaagaaccagctgcatttttgaagagattaagtgatcattctgtagaaccagggaagtccataattctggagagcacctacactggaacacttccaatttctgtcacttggaaaaaggatggttttaacataactacctctgaaaaatgtaacatagtcacaacagagaaaacttgtatcctggaaattctgaatagcacaaaaagagatgcagggcagtattcctgcgagattgaaaatgaggcaggaagggatgtttgtggagctctggtatctacattagaaccgccttattttgttacggaactggaacctctggaggcagcagttggagattcggtttctttacaatgccaagttgctgggacaccagaaattacagtgtcttggtacaaaggagataccaaattacggccaactcctgaatacaggacctactttacaaacaatgtggccacacttgtttttaataaagtgaacatcaatgacagtggagagtacacatgcaaagcagaaaatagtataggaactgcttcttctaagactgtgttcagaattcaagagcgccaactcccaccttcttttgcaagacaattaaaggacattgaacaaactgtggggttacctgttacactcacttgtcgattaaatggctctgcacccatccaagtgtgctggtatagagatggagtacttttaagagacgatgaaaatctacagacttcatttgtagataatgtggcaactttaaaaattttgcaaactgacttgagtcactctggccagtactcttgctcagcttccaacccacttggaacagcatcttctagtgctagactcacagcaagagaacccaagaaatctcccttctttgacatcaagcctgtatctatagatgttattgctggagaaagtgctgattttgagtgtcatgttactggtgctcaaccgatgcgaatcacttggtcaaaagataacaaggagatccgtcctggaggaaactatacaatcacatgtgtgggaaacactcctcatttgagaattcttaaagtaggcaaaggagactctggtcaatatacttgccaagcaaccaatgatgttggcaaagacatgtgctcagctcagctcagtgtaaaagaacctccaaagtttgttaagaaattagaagcttcaaaagttgcaaagcagggagaatccattcaactggaatgtaaaataagtggctccccagaaatcaaagtttcatggttccgaaatgacagcgaacttcatgaaagttggaaatacaacatgtcattcattaattctgtggcattgcttacgatcaatgaagctagtgctgaagacagcggggactacatttgtgaggctcataatggtgttggtgacgccagctgcagcacagcgttgacagtgaaagcacctcctgttttcacccagaagccttctccagtaggagctcttaaaggttctgatgtgattctccaatgtgaaatttcgggaactcccccatttgaagtagtatgggttaaagatcgaaagcaggttagaaacagcaagaaatttaaaatcacttcaaaacattttgatacaagtcttcatatccttaatcttgaagcctccgatgtcggggaatatcactgcaaagctactaatgaggtgggaagtgacacgtgttcttgctctgtcaagttcaaagaacctccacgattcgtgaaaaagctaagtgacacctcaacccttattggggatgctgttgagttacgggccatagtggagggcttccagccaatttctgttgtctggctgaaagatagaggtgaagtcatcagagagagtgaaaataccaggatttcattcattgataacattgcaaccctccagctggggagtccagaagcatctaattctggaaaatatatatgccaaatcaaaaacgatgctggaatgagagaatgctctgcagtcttgactgtactagaaccagcaagaatcatagagaagcccgaacccatgactgtcactactggaaatccttttgcattagagtgtgtagtgactggaacaccagaactctcagccaagtggttcaaagatggaagagaattgtctgcagacagcaaacatcacattacattcatcaataaagtggcttcccttaaaatcccctgtgccgaaatgagtgacaaaggattatatagctttgaagtgaaaaacagtgttggcaaaagtaactgcactgtatccgtccatgtttctgatcggattgtgcctccttccttcatccgcaagctgaaagacgtgaatgccatcctgggggcctcagttgttttggagtgccgagtctctggctcagccccgatttcagttggctggtttcaggatggaaatgagattgttagtgggcccaaatgtcagtccagcttttcggaaaacgtctgtactttgaatctgagcttgttggagccctccgacacaggcatatacacgtgtgtggctgccaatgtagctggttccgatgagtgctcagcagtcctgactgtgcaagaaccaccatcttttgaacaaacccctgattctgtggaagttttgcctggaatgagcctcacattcaccagtgtcatcagaggcacccctcctttcaaggtcaagtggtttaaaggcagcagggaactggtgcctggggagtcatgcaacatctctctggaagattttgtcacagaactggagttgtttgaggtgcagccattagaaagtggagactattcttgcctcgttacaaatgatgctggcagtgcttcctgtaccacacatctttttgtgaaagaaccagccacctttgtgaaaagattggctgatttcagtgttgagacaggaagccccatagttctcgaggccacatacactggcacacctccaatctcagtgagctggataaaggacgagtatcttatttcacaatctgagagatgcagtattactatgacagaaaaatctaccatactggaaattcttgagagcacaatagaggattatgcacagtacagctgcctgatagaaaatgaggctggtcaagatatctgtgaagctctggtgtctgtcttagaaccaccgtactttattgaacctctggaacatgtggaagcagtcattggagaacctgcaactttacagtgtaaagtggatggaactccagaaattagaatttcttggtataaagaacacacaaagctacgatcagctcctgcatataaaatgcaattcaaaaataacgttgcttccttagtaatcaacaaagtggatcacagtgatgtgggagagtattcatgcaaggcagacaacagtgtgggggcagtcgcttcttcagctgtgcttgttatcaaagcgcgcaaacttccacctttctttgcaagaaaactgaaagacgttcatgagactctaggcttcccagttgcatttgaatgccgcatcaatggctcagaacctcttcaagtgtcttggtacaaggatggggttcttttgaaagatgatgctaatttgcagacatcttttgttcataatgtagcaactcttcagattttacaaactgaccagagccacatagggcagtataattgctctgcttctaatcctcttgggactgcttcatccagtgccaagctcattctctcagagcatgaagtgcctcctttctttgatctaaagcctgtatcagtagatcttgctcttggagaaagtggtacttttaaatgtcatgtaactgggactgcaccaatcaaaatcacttgggccaaagataaccgagagattcgccctggaggcaactacaagatgactttggtagaaaatactgccactctgacagttctcaaagtaggcaaaggcgatgccgggcagtacacctgctatgcaagcaacatcgctggaaaagactcttgttctgctcagctgggtgtacaagaaccacccaggttcattaagaagctagaaccttcaagaattgtgaaacaggatgaattcacaaggtatgaatgcaaaatcggtgggtctccagaaatcaaagttttatggtataaggacgagactgaaattcaagagagcagtaaattcagaatgtcattcgttgactcggtggctgtgctggaaatgcacaatctcagtgttgaagacagtggagactacacctgtgaggcccacaatgcagcaggcagtgccagcagcagcacatccttaaaagttaaagaaccacccattttccgcaaaaagcctcatcctatagagacactgaaaggagctgatgttcaccttgaatgtgagcttcagggcactcccccatttcacgtttcttggtataaagacaagagagaacttaggagcggcaagaagtacaagataatgtctgagaacttcctaaccagtatccacatcctgaatgtcgatgctgcagacattggggaatatcagtgtaaagccacaaatgatgtgggaagcgacacttgcgttggttccatcgctctcaaagcaccaccaagatttgtgaagaagctcagtgacatatctactgtcgttggtaaagaagttcagctgcagactaccattgaaggcgctgaacccatttcagtggtgtggttcaaagataagggagaaatcgttagagaaagtgacaacatatggatttcttattcagaaaacattgcaaccttacagttttcaagagtggaaccagccaatgctggaaaatacacttgtcagatcaaaaacgatgctgggatgcaagagtgcttcgccacgctatccgttctcgagcctgcaacaattgtagaaaagccagaatccataaaagttaccacgggagacacctgtaccttggagtgtacagtagctggcacccctgaactcagtactaagtggtttaaggatggaaaagagctaacaagtgacaacaaatacaaaataagcttcttcaacaaagtatccggccttaagatcatcaatgtagcaccgagtgacagtggggtatacagttttgaggtgcagaaccctgttggcaaagacagctgcacagcttcattgcaggtttcagaccgaaccgttcctccttcattcacaagaaaattgaaagagacaaatggtctatccggctcctcagttgtaatggagtgtaaagtctatgggtcacctccaatctctgtctcctggttccatgaaggaaatgagatcagtagtggaaggaaataccagaccaccctgacagataatacttgtgctttaactgtgaacatgctggaagaatcagacagtggtgactacacatgtatagctactaatatggctggttctgatgaatgtagtgctcctttgactgtgagagaaccaccatcttttgttcagaaacctgatcccatggatgttttaactgggaccaatgtaactttcacaagtatcgtaaaaggaacacctcctttcagtgttagctggttcaaaggtagcagtgaactagtaccaggtgacagatgcaacgtgtctttggaggattcagttgctgaactggagttgttcgatgtagatacatcacaaagtggagaatatacttgcatagttagcaatgaagctggcaaggcttcttgtacaacacatctctacataaaagccccagccaaatttgtgaagaggctgaatgattacagcatagagaaaggaaaacccctgatcctagagggtacattcactggaactcctcccatttcggttacctggaagaaaaatggcataaatgtaactccttctcagaggtgtaatataactacgactgaaaaatcggcaatcctggaaattccaagtagcacagtagaggatgcaggacaatacaactgctacattgaaaatgcctctggaaaagattcctgttcagcacaaatactcatactagaaccaccgtattttgtcaagcagttggagccggttaaggtgtctgttggagattctgcctctctacaatgccagcttgctggaacccctgaaattggggtatcctggtataaaggagatacaaaattgagacccactacgacttacaaaatgcattttaggaataatgttgctacactggttttcaaccaggttgatattaatgatagtggagaatatatctgcaaagctgaaaacagcgtgggagaagtttctgcatcaactttccttaccgttcaagagcaaaaacttccaccatcattttctcgacaattgagagatgttcaagaaacagttggactgccagttgtttttgattgtgccataagtggatcagaacctatctccgtgtcttggtataaagacggcaagccattgaaagacagcccaaatgtacaaacatcatttttagacaatacagccacactcaatatttttaaaactgaccggagccttgcaggccagtattcctgcacagctacaaaccctataggctctgcttcttccagtgccaggctcattctcacagaggggaagaacccacccttctttgacatccgtcttgcccctgtggatgctgtggtgggagaaagtgctgactttgagtgccacgtcacgggcacacaaccgataaaggtcagctgggccaaagacagcagagaaatacgaagtggcggaaagtaccagattagttatctggaaaacagcgcccacctgacagtcctcaaagtagacaaaggagattctggacaatatacctgctatgctgtgaatgaagtgggaaaagactcttgcacagctcagctgaatataaaagagcggctcatcccaccaagtttcactaaaagactctcagagacagtagaagaaacagaagggaattctttcaaacttgagggacgtgtggctggttcccaacctataactgttgcctggtacaaaaataatatagagatacaaccaacttctaactgtgaaataacattcaagaacaacacgttagtgctgcaagtcaggaaagcaggcatgaacgacgctggtttgtacacatgcaaagtgtccaatgatgcaggctctgctctgtgcacgtcttcaatcgtcatcaaagaacctaagaagccacctgtatttgatcagcaccttactccagtaacagtgagtgaaggagaatacgtgcagctcagctgccatgtccagggatctgagccaattaggatccagtggttgaaggctggcagggaaataaagccttcagacagatgcagcttcagctttgctagtgggacagctgtactggaactcagagatgtggctaaagcagattcgggagattatgtgtgtaaagcttcaaatgtggctggaagtgacactaccaaatcaaaagtgaccattaaagacaaaccagctgtggccccagcaaccaagaaagctgcggtagatggaagactcttttttgtgtcagaacctcagagtatcagagtcgtagaaaaaaccactgcgaccttcattgcaaaagttggaggtgacccaatcccaaatgttaaatggacaaaagggaagtggagacagctgaaccaaggaggtcgtgttttcatccaccaaaaaggcgatgaagcaaaactggagattagggacaccacaaaaactgattctgggttataccgatgcgtggcatttaacgaacatggtgaaattgaaagtaatgttaacttacaggtggatgaaaggaagaaacaagagaaaattgaaggcgatcttagagcaatgctgaaaaagactccaatcttaaagaaaggagctggagaagaagaggaaattgatatcatggaacttctcaaaaatgttgatcctaaagaatatgaaaaatatgcccgcatgtatggaatcactgacttccgaggtcttcttcaagcatttgaactgctcaagcaaagccaagaagaagagacacatagactggaaattgaggaaatagagaggtcagagagggacgaaaaggaatttgaggaacttgtatcatttattcagcaaagactgtcacagacagagcctgtcactctgatcaaggacattgaaaatcagacagttttgaaagataatgatgctgtctttgaaattgacattaaaattaattatccagaaatcaagctttcgtggtacaaaggaactgaaaaactggaacccagtgataaatttgaaataagcattgatggtgaccgacatacactcagagtcaaaaactgtcaacttaaagaccagggcaattatcgattggtttgtggtccacacatcgctagcgctaaactaactgtaattgagcctgcatgggaacggcatcttcaggatgtgactctgaaagaaggccagacttgcaccatgacatgccaattttctgtaccaaatgtaaaatctgaatggttcagaaatggcagaatccttaaaccccaaggtagacataaaacagaagtggaacacaaagtccataaattgaccattgcagatgttcgagcagaagaccagggtcagtacacctgcaaatatgaagaccttgaaacttcagcagaactcagaatcgaagctgaaccaattcagtttacaaagcgcatacagaacatcgtggtgagtgagcatcagtctgccacctttgagtgtgaagtgtcctttgatgatgccattgtaacatggtacaaaggaccaacagaactgacagagagccagaaatacaacttcaggaatgatggccgctgccattatatgaccatccacaatgtgaccccagacgatgaaggtgtctactcggtcatcgctcggctggagccaagaggtgaagcaagaagcacggcagagctgtacctaacgacgaaagaaatcaaacttgagctgaagcctcctgatattcctgactccagagttccaatcccaaccatgcctatcagagcagtgccaccagaagaaatccctcctgtggttgctcctcctatcccccttttgctaccaacacccgaagaaaagaaaccaccaccaaaacgtattgaagttaccaaaaaggctgtgaagaaagatgccaaaaaagttgttgcaaagcccaaagagatgacaccacgtgaagagattgtcaagaagcctccacctcctactaccttaattccagcaaaagctcctgaaatcattgatgtatcctctaaagctgaagaagtaaaaataatgactataaccagaaagaaagaggttcagaaagaaaaagaagctgtgtatgagaaaaagcaagcagtccacaaggagaagagagtcttcattgaatctttcgaagaaccttatgacgaactggaggtagaaccatacacagagccatttgaacaaccttattatgaagaaccagatgaagactatgaagagattaaggtagaagctaaaaaagaagttcacgaggaatgggaagaagattttgaagaagggcaagaatactatgaaagggaagaaggctatgacgaaggggaggaagagtgggaagaggcttaccaagaaagggaagtaattcaagttcaaaaggaggtctatgaagaatcacatgagagaaaagttccagccaaagtacctgaaaagaaagcaccaccacctcctaaagttataaagaagccagtaattgaaaaaattgaaaagacttctcgaagaatggaggaagaaaaagttcaagtcaccaaagtacctgaagtttcaaagaagattgttccacaaaaaccttcccggactccagtacaggaagaagttattgaagtgaaagtaccagctgtgcatacaaagaagatggttatttcagaagaaaagatgttctttgcttctcacacagaggaggaggtgtcagtcacagtccccgaggtacaaaaggaaattgttactgaagagaaaattcacgttgccatttccaaaagggttgaaccaccacctaaagtccctgagctacctgagaaaccagctccagaagaagtggcccctgttcctatccctaaaaaagtggagcccccagcaccaaaagttcctgaggttcccaagaaacccgtgccagaggagaaaaagccagttcctgtgcctaagaaggaacctgctgctcccccaaaagtcccagaggtgccaaagaaacctgtccctgaagaaaagattcccgttcctgttgcaaagaaaaaggaagctcccccagctaaagttcctgaagtacagaagggagttgtgacagaagaaaaaataaccattgtaactcaaagagaggaatctccaccaccagcagtgccagaaataccaaagaagaaagttcctgaagaaaggaaacctgttcctcggaaggaggaagaagttccaccaccaccaaaagtgccagctctgcctaagaaacccgtcccagaggagaaagttgcagtgccagttcctgtcgctaagaaagctcctcctccccgagctgaagtctctaagaaaactgttgtagaagaaaagagatttgttgctgaagaaaaactatccttcgcagttcctcaaagagtggaagtcacgcggcacgaagtatctgcagaggaggaatggagttactcagaagaggaggaaggtgtgtccatttcagtttatagagaagaagaaagagaggaggaggaagaagcagaggttacagaatatgaagtgatggaagagcctgaggaatatgttgtggaagaaaagctgcacattatttctaagagagtggaagctgagccagctgaagtgacagagaggcaggagaagaaaattgtactgaaaccaaaaattcctgctaaaatagaggagcctccaccggctaaagttcctgaagcacctaagaaaattgtgccagaaaagaaagttcctgctccagttcctaaaaaggaaaaggtgcccccacctaaagtgccagaagagccaaagaaaccagttccagaaaaaaaggttcctccaaaagtcattaagatggaagaacctctcccagccaaagtgactgagaggcacatgcaaattacccaggaagaaaaagttcttgttgctgtaactaaaaaagaggcgcctccaaaagcaagagtgccagaggaaccgaagagagctgtcccagaagaaaaagttctgaaactcaaacctaaaagagaggaggaaccaccagctaaagtgactgaattcagaaaaagagtggttaaagaagaaaaagtatcaattgaagctccaaaaagagaacctcaacccatcaaagaagtaactataatggaagagaaagaaagggcttataccctagaagaagaagctgtttcagtacaacgggaagaagaatatgaggaatatgaagaatatgattataaagaatttgaggagtatgaaccaacagaagaatatgaccaatatgaagaatacgaggagcgggagtatgaacgatatgaagagcatgaagaatacatcacagaaccagagaagcctatccctgtaaagcctgtcccagaagaaccagttcccacaaaaccaaaggccccaccggctaaagtgctgaagaaagctgtccctgaagaaaaagtaccagtgcccattcctaagaaactcaaacctccaccacccaaagtgcctgaagaaccaaagaaagtttttgaggaaaaaatacgtatttcaattaccaaacgtgaaaaagagcaggtgactgaacccgctgctaaagtgcccatgaagcccaagagggttgtcgcagaagaaaaagtacctgtccctagaaaagaagtagcaccacctgttagagtgccagaagtgcctaaagaacttgaaccagaagaggttgcctttgaagaggaagttgtaacccatgt

SEQ ID NO: 356 - DNA, 5968 bp, Artificial Sequence
  DNAJC6
ggcgccccgagccgagctcagcccagggcggcggcttcgcctcgcccggcgaagcttctctccggtggccgctccttcttttccctcctctttgcgtcatgtcgggcacttaatttttttttttttttaattccttcttcagccctttccaccttccatctcccttttcgcttcccaggttgattattttctcttttctccgggcttgcccatgagcctcctcgggagctaccggaaaaagaccagcaacgatggttatgaatctttgcagctggtggacagtaacggggacttaagtgcgggaagcggcggggttggcggcaagcagagagtgaacgccggggcagcggcgcggagtcccgcccgacagcctccggaccgcgccagcaccatggacagctcaggtgcctcatctccagacatggagcccagctatgggggaggtctctttgacatggtaaaaggaggtgcagggaggctctttagtaacctaaaggacaacttgaaagacaccctcaaagacacatcttctagagtgatacaatctgtgaccagctacacaaagggagatttagacttcacttatgttacctccagaattattgtgatgtcctttcctctggacaatgttgacataggattcaggaatcaggttgatgacattcgaagctttttggattccagacatcttgaccactacacagtatacaatctgtcacctaagtcttatcgaactgccaagtttcacagccgggtctcagaatgcagttggcccattaggcaggctcccagtctgcacaacctttttgctgtgtgtcggaatatgtataactggctactgcagaatcccaaaaatgtctgtgttgtccactgcttggatggacgggcggcatcatcaattctggttggtgctatgttcattttctgtaatctctactctactcctggcccagccattcgattgctatatgcaaagcgaccaggaattggactttcaccatcccataggagatacctgggctatatgtgtgacctactggcagacaagccctaccgccctcacttcaagcctctcacaattaagtcgatcactgtcagtccaataccctttttcaacaaacagaggaatggatgtcgcccttactgtgatgtactcattggagaaaccaaaatatattcgacttgcacagattttgaacgaatgaaagaatatcgtgtccaagatggaaaaatcttcattcccttgaacatcactgtgcaaggagacgtggttgtttccatgtatcacttgaggtcaaccattgggagccggctacaggctaaggtgaccaacacacagatattccagcttcagtttcacactggattcataccactggacacaacagttttaaagttcaccaagcctgagttagatgcatgtgatgtaccagaaaaatatcctcagctatttcaggtgacactggatgtagaactacagccccatgacaaagtaatagacttaactccaccatgggaacattactgcacaaaagatgtcaatcccagcatcctcttctcttctcaccaggaacatcaagatacgctggccttaggaggacaggctccaatagatatccctccagacaaccccaggcattacggacaaagtggtttctttgcctctctctgttggcaagatcagaaatcggagaagtcattctgtgaggaggaccacgctgccctagtgaatcaggaaagtgagcaatcagatgatgaacttctgacactttccagtccgcatggcaatgccaatggtgacaagcctcatggagtcaagaagcccagcaaaaagcagcaggagccagcagcccctccaccccctgaggatgtggaccttttgggcctggaagggtctgcaatgagtaacagcttctctccgccagcggctcctcccaccaattctgaactactgagtgacctgtttgggggtggaggtgcagctggtcccacccaggctggacagtcaggagtggaagatgtgtttcatcctagtggacctgcgtctacccagtcaacaccacgccgctctgccacctccacctctgcgtctccaaccctaagagtgggagaaggtgccacctttgacccatttggagcaccttctaaaccatcaggtcaggatttgctgggttcttttctgaacacatccagtgcttccagtgacccctttctccagccaacaagaagtccttcgcccacagtacatgcttctagtacgcctgctgtgaacattcagccagatgtttctggaggttgggactggcatgctaaaccaggaggctttggaatgggaagcaagtcagctgccaccagcccaaccggatcctcgcatggtactcccacccatcaaagcaaaccccagactctggatccttttgccgaccttgggacactaggtagttcttcctttgccagcaaacccaccacaccaactggattgggtggaggattcccgcctctcagctcgccacagaaggcgtctccccagcctatgggtggcgggtggcagcagggaggtgcctacaactggcagcagccacagcctaagcctcagcccagcatgccccactcctctccccagaaccgacccaactacaacgtgagcttctcagccatgcctgggggccagaacgaacgtgggaaaggatcaagtaatttggaagggaaacaaaaagcagctgattttgaagacctactctctggtcaaggtttcaatgctcacaaagacaaaaaggggcctcggacaatagctgagatgagaaaggaggaaatggccaaggaaatggatcctgagaaattaaagattctggaatggattgaaggcaaagaaagaaatatcagagcccttctttccacgatgcataccgtactatgggctggggagaccaagtggaaaccagttggcatggcagacctggtaacaccagagcaggtgaagaaggtgtacaggaaggctgtcctggtggtgcacccagataaagctactgggcaaccctatgaacaatacgcaaagatgattttcatggagctcaatgatgcctggtctgaatttgaaaaccaaggccaaaagcccttatattaatttatgagcttttccatctctgctgcagacctgtgctaatgcttagtgtgtgtcacaattctgaggttttcgcagatgaaccaaaaactccagtaacatgttttcagtactaaaccgttaagttactcatgaattaatttctcattgataaggaatgtggatgtttggtttctccaaagttcccaccataaaagatccaaagcatgagaggaacttctagtcagatgaccttgcagaaccaccgcattccaccctgccctttggggagcctactcagcattctacctggggaaatggaaaacagaggccaccacccatgaaggcataacacccatcacattgtctgagaataggattaatgagcaaaagttatgataatagagttatatgatggtttaatggtttctagatttttcttggaaagatataatttgagcagtggctttatgcagactccaagaacaaaaccaccaggtatttttttttaagtaaaaatttactaaggcctttagcataatactgtaaatgtcttttggtcaagagaactaacaaatataaaggaacttgaaatgtggggagtgataatagtccagtgattaaactacagtccagtgattaccaccaactttctgactaagctaaaaatgaatgaaaatggtggctaaagaaaatagggactctgaagatgtcgaaatctttattcctggttaggaaggtgggccgctacccttctttccctttagaaaactgtgattaattaaataaaaagtcttactactataacaactctaaacctggtttaaatgaaacatctaattttgctgtaaggcttaatgctcttcttttgtttagccaagaaaacattcttagttggaaacaggtggtaaagtagtttggcctgttcacaacttatcaggaccaatatctagtgtggactcagtgttctctaggtttgtgagcagttgtggtaagagaatggaaggcaacactgaataggagttaagggaatggcacgatcacagtgagagagctgcactcacctgcagacccagtcagatggcttgtcagtatctgctctgaggaaccaggtcccacctccccacaaggcaaatctagacccattaaattattacagtgggcttttttgttttaaaagtggttggggatccacaggaacgacattcatacagggacatttgtgaaagcaaagcaagaatgaatgctttcccgatctcagactggctggattcagatcagtgtgttggctggttctcattttaaggggtaagcagtttgctattctgtgactttagtagatctcttttgtgtgcacatatacaatgtgcattatacatatatattaaatatatccacaaagcagatgggcaaaaagattttcatgctaatcttcaaaggttcatgctcaatattgtgaaaagcttttaaaagttgttttgaaaagacaatcattttttgtttttgttttaactttcttgtggcaagctataccggaaaagcggcatgtcaaaaatactttaggttctacatagatctctttctctcttttgttttgtttgtttgtttgttaaagttcattatttattttaccttttactgacaatgtgaaactcgaagaaaatgttctctttttaaatatacagtcataaactgttcaaggtaaccataacaaactaggtgttatttattaacgtattataaaataatgtttgatccagtatgtgcttgtcttatttaaaattggaatgtgagacatgttgctgtgacctgtttttctttctcattcacatttgtagatattgtgtgaactacagtatataatgataacaattaaaaggatattctgtggatgtcacgtattttgaaatgatagaactacattagctttgtatcatgtttggataattcatcaatgttcacagtttaaaacatcattaaacattatgtaattacaatgagaaagaatcttacttaaatttggagattttcccccacatctcttttccggatacattataattctggacccctatttatctcaaaactcttaatatatgcagaccaacaggtctttgcattccttttaaataactggttgtgacaaagcttgttgttgatcagattcactgtttcatcatatttattgtaatatattttttgttttgtaaatatgttacaacaaaatgtgattggtctaaaatatttgtaatgtatattaaaaggttcaaaaatatttgtataaatctaagttatttgggtacttgtaggaatacaatgaggagcttgaatgccaccttctgacatgatttacttttaaggaaagttatgaggagagaatacaaaaagcatgcaccaaaatgtaatctgacaggatttctggatttatacgtaatcactcctgccccaacacacacacacacacacacacacacacacacacacatgcacgcacacatgattttgattatgctacatgatatatgtttcaaaaagaattagcatagaaatcctggtctcctagccaaaaaaatcaaaggattttcaaaaaaacgaatctgtatgttgaggcaaaaggattgaacctggaagtctgggactttatcatagaaacaaagtctcagatattttagttctttggaaacaaatgctgtaattcaaaagcatttgacctgtcactgtactatctacatgtggaagaatgttcaagttgaatcctaatgccgtgaatgaaacacagtctgtgtagggaatgagcaaaaaagttgaattccaattgctttttggccttttggctaaaataaatgtagcatctaattttatcagttt

SEQ ID NO: 357 - DNA, 6534 bp, Artificial Sequence
  CLCN4
tcccagccggcctccggggccctccgggctgaaatcgacatttgcctctggcaggaaaatgagcttgtcagtttctgcctccattagaccctcaacccaaaggagcaggagatttcggtagcgttttaactttatctcagaatctgaaagcggaaggccaggcaagctgcacacatcaagcgaaacgcctgaggggcggccagcgcgagggtttctggccatcgaccctcacctcccgggacttccagggtcttccccccaccccgcgcacacctccctgcctcgccccgagggcgtcacgtggcagcgtggggcccgcctcctggtgatgtcacggcgctcgcagccgtcgcgctgaagaaaggatgctcgaggatgctgtccaggtgggcggccgcgggcgcgatgcggcactgcaggcaccttggctggggtcatcgatctcgccgtggactggatgacggacctgaaggagggggtctgcctgtctgccttctggtatagccatgagcagtgttgctggacttctaacgagaccacttttgaggacagagacaagtgtcccctgtggcagaaatggtcggagctgctggtgaatcagtcagagggtgccagtgcttacattctgaattacttaatgtacatcctatgggcgctgctgtttgcatttttggctgtctccctggtgcgtgtatttgcaccatatgcctgtggctctggcataccagagataaagaccattttgagcggctttatcatcaggggctacttggggaagtggaccctgctaatcaagacagtcacgctggtgctggtagtgtcctccggtctgagccttgggaaggaagggccgctagtgcacgtggcttgttgctgtggcaacttcttcagcagccttttctccaagtacagcaagaatgagggcaagaggcgggaggtgctttcagctgcagcggctgctggagtctctgttgcctttggtgcaccaattggaggcgtgcttttcagtctagaagaggtcagttactactttcccctgaagaccttgtggaggtcatttttcgcagccctggtggcggcctttacgctgagatccatcaatccctttgggaatagccgtctcgttctcttttatgtggaataccacacgccctggtacatggctgaactcttccccttcatcctgcttggggtcttcgggggcttgtggggaaccctcttcatccgctgcaacatcgcctggtgcaggaggcgcaagaccaccaggctggggaagtacccggtgctggaggtcattgtggtgactgccatcactgccatcattgcctaccccaatccctacacacgccagagcaccagcgagctcatttctgagctgttcaatgactgtggagcccttgagtcttcccagctctgtgactacatcaatgaccccaacatgactcggcctgtggatgacattccagaccggccggctggtgtcggtgtttacacggccatgtggcagctggccctggcactgatcttcaaaatcgtcgttaccatatttacctttggcatgaagatcccgtcgggcctcttcatccccagcatggctgtgggcgcgatagcgggcaggatggtgggaattggcgtggagcagctggcctaccatcaccatgactggatcatcttcaggaactggtgcagacccggtgcagactgtgtcacgccagggctgtacgcaatggtgggagctgcggcctgcctcggtggagttaccaggatgacggtgtcattggtggtcatcatgtttgaattaaccgggggtctggagtacatcgtgcccctgatggcggcggctgtgaccagcaagtgggtagctgatgcatttgggaaagaaggcatctacgaggcccacatccacttaaatgggtaccctttccttgacgtgaaggacgagtttactcaccgcacactggccaccgacgtcatgcggccccggcggggagagccgccactgtcggtgctcacccaggacagcatgactgtcgaggacgtggagacgctcatcaaggagaccgactacaacggcttccccgtggtggtctccagagactccgagcgcctcattggatttgcccagaggagggaactgattctcgcaataaagaacgccagacagaggcaggagggcattgtgagcaattccatcatgtacttcacggaggaaccccccgagctgccggccaacagcccacatcccctgaagctgcggcgcatcctgaacctcagcccgtttacagtgacagaccacactccgatggaaacggtggtggatatcttccggaaactggggcttcggcagtgcctggtgacgcggagcgggagacttcttggcatcatcacaaaaaaggatgttctgagacatatggcccagatggcaaaccaggaccccgaatccatcatgtttaattagcaacaaggtggcaattattttcagaaaaacactgactgtgtcatttaaaaagaaataaatgatatgttattatcccaatgaaagatcatgcattggggacagcagaaacaaaagcttttttggaaaggcggggaagaaggatgaaacctttaaaaacaaaaacaaaaacatcaatgagtaggcattttatagctttaaccccgtatgagtttcaagctgtgtttcctaatgagtttgctactgctgtgggggcatgtgggtgggtaaatgatgtaaatgatgtgatctgtacaagtatgtggagcatgaatgctgactcaagaaacttttactccttctgctcaaggctgatgtttgtaacttatgaacacacgtgaagtgttgagtccaaaagacaaaggggcatcggcatgtcagcgtccttatttattggttcttgaagttttgctgctatgttactgaatcatactaaagacatttgcgcttactttgttgaaaaagaaaaagaaattaaatttgaacacagtgaaagctgcaagtatgccagtgggtccgctcacgaccgtcctgtttcttgctcctgttctcagcctgttatctggcttatccatcagtttctgaaccaacatcaggggcacctgccatgatgagtgtgaagaaatcatttctctatgcaagactggcatcctgggactgcacgatgaactattggagcatacagtactgcggtgtgtctcctcccatacaaagggacacatccttattttgagggtatactcacccgatcattgatttgcatccccatggcatttgcttcatttatttattgcttttgcccatgcattcaatattgatcagctcagcacttccatgggccatagccggtatgcccccagcctgccataagcgtgctttcattttcaagtagcatatgcaagagtccaaacaggctacccaatgttactacttatttttcctctcaggtcttatcagatacggctgtggagaggatgaggcatatgcgttgtcagttggaatccctccaaatggattgcaagagaaatactaaattgattctaaatctgttccattatcttctctgtaggatgcaaaacatccagttgtaatgtataagcatgcacttcatactagcaatcacagcacaggaggacagcattaaattttatatagccaatttgggcactgggcatctttgtatttgaacttaacgacacatttactcttttagtcaggatttcggtcttttctgcgggaaggaattaagctatgtattaggtccaccatacgatctgtgtaagtaagattatcccacttgccctttctctttagtctttgtcccttccttttcactaagtgcccctcatccttttcaatctcattgtcactggatagtgctgtatcacttaggtgtgcattcggctgcaaataacagaaaacccagcaaacactgaagggctggataagaaccctgagagggggtactccaggactgtctccataacatcattgggatccccatcccgttgctatttctttttcaccgtttttaccttttgtcctctggcttattgcctcagagttgcaagatggttcctgaactgtcaggtatcatgtctgctttctaagtgggaagaggaagggagaggcaagcaactaggtacaatgtctatcaggaaagcaaagcttccccagagacgctcagcttgtatccattgactggaagtctgtcacgtggctccccctagccgcacactagtgtgggaaggaaaatattgagctaggcacattactctctgaacgaaattcatattatcttattaaggaagagtgttggtcttcaggaggggaagtttgctgtattggatgccatcatcgtgtccttgtcattgcccttccggttttcattcttgctaaacccctgtgaatgttcttctaaccttcctgttccccaccccttttctcagatttgacctagaattcccagcccaaatccataatttcttagctctaatacgaattttcatgttggacaaaaacctagctacaaatgggtttctatggaacttctaattaatgtgcaaaatacatattttctccaggttaagaaattttaagtcagatcatgctgacacaataagaaaatttgtttgtgtaattcattgacctcttccttccaaaataacatcaagtagccacctcagtgtgacaatatccagtcaatagtagagaatttaatccttggtcctataaaagaataaaattcattgtcgtatttatagcacgtaagccttgagtaacaggtcttaatgttagtgttggtgttgtggtttctgcggaacgtttacaagtgaagttggattctcctgggctttaaatccaaaaagtcttaatgaccgcttcatgtagttcccctcttattcccctgtggtctcctcagagccagcgtgtgctgggaaagagtattagtcatagcctggctttatagaatccaggaggtccttttagctgaaacaagtggcttcaaaagggaacatgaaacagtgaaaagatagccaaaggtcagtgaaaccacagcatttctttctaatctggctgaggccatgggggggaatgaggggaaattatgcttccgggccaaggtcaccgagggggaccttgggatttgtgtcctccccagtgcttagagtagagatacctgcaaattcatggcaaacagttggaagagttacttgactgaaacaacccaatcttactttctttcgtaagttgaacctctgatttattgtggggttcaggctctcctcaatagaaggccagagttggacaggtggactaaggtcaaggatgaggagtctgcagtggggactaccacagcaaactgccttccttccgtggagtcctaactcagccatgtggtccactcacccaggggcccgggggctcagacaaaccccatggggaacatgctgccatgctctgtctttcttgtaaacgtagttgggtagggatcccaagggtatttgctctctccaaatgcagaacttccatccactttatctggtgatctgatgaacagcatggggacgtggaggtgaaataagcatctttcagaataaggtttttttttttttcctcttccagaaccaaaggctttagacatttgtagaactttctggattccttctgaatcgggttttaacataaaaaaccatcaacacatcatgggaaaggagctctttcatgatatacatcacatgtttcttgctctcactgaggaaatgtgttgtacaaaagcaccaaataagggcaccctggaagtgacatgtgtgtttcttctaagtcgtttttagtgcatcccctgcgattgcatgatgctcatgtggcttttagggaaaggcagaatgtgctagaagtcgaagtcattcaatattcagtgcttactgttactttgaaccaggtaatctcagttctttattcagtccttcccaaagaccttacaaaggagatgtgtaaactgatagattttgagcctaataagtcacagaaatggaaaattttagagcagtttgtttcacttaggtgagaactgattactttaaattaccaacatgtgcaaattctacttagtattcattattagatgctaagctggaaaagatgagaaacccaaggagaactattgaattaccacataattgtaatattatgctttaattttgtatgggcagtgttctatcagactaagcttctagcctttgaaatgatttacatgaggagagagcctgtatatctgacttgggaaacattaagcagaccctattttcactggcgcggtaataactatttatttgctatcctagaggtgctgggaatgagcctacgtgcgactttgatgagatatattcacatttggtgttggaacgaccacatagcaacgtgttggtttttttttattgtaacactctgtgtaaacgttgacaccttattaaatattaaatgtctgaactctatttttaaaaataaaacaagcacagagtctgcaacaaacatgtaaa

SEQ ID NO: 358 - DNA, 3823 bp, Artificial Sequence
  DDX11
tgcgcagcggcgggggttgttccggctgcctttcactgaggggacccgccagtttctaactcagtggcgtttgccctgattcccggggcctggctttcagcgtagcaattctgccggcgaagaaggtccatggctaatgaaacacagaaggttggtgccatccattttccttttcccttcacaccctattccatccaggaagacttcatggcagagctgtaccgggttttggaggctggcaagattgggatatttgagagtccaactggcactgggaagtccttaagtcttatttgtggggccctctcttggctccgtgactttgaacagaagaagcgtgaagaagaggcacgactccttgaaactggaactggccccttacatgatgagaaagatgaatccctgtgtctgtcttcttcctgcgaaggggctgcaggcaccccgaggcctgctggagaaccggcctgggttactcagtttgtgcagaagaaagaagagagggacctggtggaccgactaaaggcggagcaggccaggaggaagcagcgagaagaacgcctgcagcagctgcagcacagggtgcagctcaagtatgcagccaagcgcctgaggcaggaagaagaagaaagagagaatctcctccgcctcagcagggagatgctagagacaggcccggaggctgagcggctggagcagctggagtctggggaggaggagctggtcctcgccgaatacgagagtgatgaggagaaaaaggtggcgagcagagtggatgaggatgaggatgacctggaggaagaacacataactaagatttattactgtagtcggacacactcccagctggcccagtttgtgcatgaggtgaagaagagcccctttggcaaggatgttcggctggtctcccttggctcccggcagaacctttgtgtaaatgaagacgtgaaaagcctaggttctgtgcagcttatcaacgaccgctgtgtggacatgcagagaagcaggcacgagaagaagaaaggagctgaggaggagaagccaaagaggaggaggcaggagaagcaggcagcctgccccttctacaaccacgagcagatgggccttctccgggatgaggccctggcagaggtgaaggacatggagcagctgctggcccttgggaaggaggcccgggcctgtccctattacgggagccgccttgccatccctgcagcccagctggtggtgctgccctatcagatgctgctgcatgcggccactcggcaggccgcgggcatccggctgcaggaccaggtggtgatcatcgacgaggcgcacaacctgatcgacaccatcacgggcatgcacagcgtggaggtcagcggctcccagctctgccaggcccattcccagctgctgcagtacgtggagcgatacgggaagcgtttgaaggccaagaacctgatgtacctgaagcagatcctgtatttgctggagaaattcgtggctgtgctaggggggaacattaagcaaaatcccaatacacagagtctgtcacagacagggacggagctgaagaccatcaacgactttctcttccagagccagatcgacaacatcaacctgttcaaggtgcagcgatactgtgagaagagcatgatcagcagaaagctctttggattcactgaacggtacggagcagtgttctcatcccgggagcagcccaaactggctgggtttcagcaattcctgcagagcctgcagcccaggacgactgaagctcttgcagcccctgcagacgagagtcaggccagcaccctgcgaccagcttctccactgatgcacatccaaggcttcctggcagctctcactacggccaaccaggacggcagggtcatcctgagccgccaaggcagcctcagtcagagcaccctgaagtttttgctcctgaatccagctgtgcactttgcccaagtggtgaaggaatgccgggcagtggtcattgcggggggtaccatgcagccggtgtctgacttccggcagcagctgctggcctgtgccggggtggaagctgagcgcgtggtggagttttcctgtggtcacgtgatccctccagacaacatcctgcccctcgtcatctgcagcgggatctccaaccagccgctggaattcacgttccagaaaagagagctgcctcagatgatggacgaggtgggtcgcattctctgtaacctgtgcggtgtggttcctggaggggtggtctgtttcttcccctcctacgagtacctgcgccaggtccatgcccactgggagaagggtggcctgctgggccgtctggctgccaggaagaagatattccaggaacctaagagcgcacaccaggtggagcaggtgctgctggcatattccaggtgcatccaggcctgtggccaggagagaggccaggtgacaggggccctgctcctctctgtggttggaggaaagatgagtgaagggatcaacttctctgacaacctaggccggtgtgtggtgatggtgggcatgcccttccccaacatcaggtctgcagagctgcaggagaagatggcctacttggatcaaaccctcagcccccggccaggcacccccagggaaggctctggtggagaacctgtgcatgaaggccgtcaaccagtccataggcagggccatcaggcaccagaaggattttgccagcgtagtgctcctggaccagcgatatgcccggccccctgtcctggccaagctgccggcctggatccgagcccgtgtggaggtcaaagctacctttggccccgccattgctgctgtgcagaagtttcaccgggagaagtcggcctcttcctgatgggcaaccacaccactgcctggcgccgtgcccttcctttgtcctgcccgctggagacagtgtttgtcgtgggcgtggtctgcggggatcctgttacaaaggtgaaacccaggaggagagtgtggagtccagagtgctgccaggacccaggcacaggcgttagctcccgtaggagaaaatgggggaatcctgaatgaacagtgggtcctggctgtccttggggcgttccagggcagctcccctcctggaatagaatctttctttccatcctgcatggctgagagccaggcttccttcctggtctccgcaggaggctgtggcagctgtggcatccactgtggcatctccgtcctgcccaccttcttaagaggcgagatggagcaggcccatctgcctctgccctttctagccaaggttatagctgccctggactgctcactctctggtctcaatttaaaatgatccatggccacagggctcctgcccaggggcttgtcaccttcccctcctccttcctgagtcactccttcagtagaaggccctgctccctatcctgtcccacagccctgcctggatttgtatccttggcttcgtgccagttcctccaagtctatggcacctccctccctctcaaccacttgagcaaactccaagacaccttctaccccaacaccagcaattatgccaagggccgttaggctctcaacatgactatagagaccccgtgtcatcacggagacctttgttcctgtgggaaaatatccctcccacctgcaacagctgcccctgctgactgcgcctgtcttctccctctgaccccagagaaaggggctgtggtcagctgggatcttctgccaccatcagggacaaacgggggcaggaggaaagtcactgatgcccagatgtttgcatcctgcacagctataggtccttaaataaaagtgtgctgttggttaaaaaaaaaaaaaaaaaaaaaaa

SEQ ID NO: 359 - DNA, 2806 bp, Artificial Sequence
  GPM6A
attatcttggctaccgagtcggttgtggggtgctgagacaacgtgtgtgtctgtaatgtgcattcaatgtatttaggagagagactttgcacgtgtctctaatgaaagtgaaagggggcagggtgggggcctctggggaggagacccacagtgaaggggaggaaaacgggcttctcgcagaggaggcaggtggaaagagggaggggtctgtgcgcccgcagagtcgccaggcgccctgcgagttgtctccgctgggaggggcgaggctgtcacttgccagggcgcgaggagcctcagcgcggcttggagaacttggccccgcgcagcgtctggtcactcgctctcctctggggactgcagagaagcaggacctcgggccatggttcattatgctgacatatcttttcatgttggcctggctgggagtcacggctttcacctcactgccagtttacatgtacttcaatctgtggaccatctgccggaacaccacattagtggagggagcaaatctctgcttggaccttcgtcagtttggaattgtgacaattggagaggaaaagaaaatttgtactgtctctgagaatttcttgaggatgtgcgaatctactgagctgaacatgaccttccacttgtttattgtggcacttgctggagctggggcagcagtcattgctatggttcactaccttatggttctgtctgccaactgggcctatgtgaaagacgcctgccggatgcagaagtatgaagacatcaagtcgaaggaagagcaagagcttcatgacatccactctactcgctccaaagagcggctcaatgcatacacataaatgcatcttcctgttctttctaccatttgaatgcattggtgtttaactaagggccatccaaccatccaacctttaaaaaacaaaacgaaagtgcttctcatcaatgatatgtaaggtgacttatgaatcacctgagtacaattctttgttgtttagcacttaaatttcccaatttattaaattgatgtaaatcagatcttttctacaagctcctatccagccttttttttgaaatttctcaaactcatttactagttctgtaaaatcaaagatactaacattgtcaaatgcaaagatttgtttgatttttaaccacttcccatgtgttatacataacaccttttgcattatttcttatgttttgaaaagaaaatagctttttatactttttagttttgatttcggtaactagtttaactacaggtaaccttcaaagggaccattgtacattatgaacaatagatagagattacatcttgatgactcttgaaatatggaaattttgtctgaagatcagtggccatattactgtaggccctggttcatgttttcatcaatctaaggtgcaatttctaaatttgtaagagtaggtttaaaaaaaaaagtgcttcttatctttgttaacattgtacttttccttgatgttcttaaaaggtatttccctcagattactcatgtttatgttgtgagcatgtagaaacagtaatgctaatgcatggctagttgcctttttaagattgtgacaccaggcttaccttttaaagtttagtatatagagacaattttaatggaaataactactgtagactattgaagaatgatctctttgtgatttaagaagtggctggattggaacttttaatatgctaatgtggaaaattaattacctttatgaaggtggtttattacaaataagcacactaacccctcggaagttgttttacctactttaaaagttttaatggattgcacctctgtaaactattcctaaaatgtgtatgatatatttgaaaaggcttccattaatataatagctttgcttgcagccttccaatctatgttggtttacctgtagtgttttataaagtgtggtcagaggcccctatagaatgtattgtttgaaagtgtagtgatatatttgtgtttttatttcaagtaagtcattttaaccgaatgttcattcatattcatttataaaaagtacctgtatcaaaggaattttaacaaagagcaatcagtattattggaccaaatttggtgtttgttttcaccttgacgctcttcttttcattatttctaatgctacaagaatgctgtaaagtgtcttctaaaatgatgtagcctgacaagacatttttttcagtgtataaaactaggtagtattgtgcactgatttgaccattgtgaaatcctttctcagtgtaactgcatttctaataaaaatttattgagtgaaacaatctttgtacaatgactagtcatgcatcatcagtaattttacaagttcttgtagtaggtagggggtactactagggatatctgtggcatgattatgcattccgtagtattatttaattaatttggggttcattttgcttccttttctttatgcttagattatcttactggttcaacatttttctgatatatgcagtattacagatattcagcaaaagtattaatgggcttctttaaattctatattatagtatttcagttccgtgtcttaacagtttgtgataatttctaaaactgtcttttcaacttatgtaatgatgttgacacttttggcttttatttctggtattagagtttgtattttcacagagtgctttgtagcaggcattacaattaatctgttttgtacataaatgtgccaacagcttgatggtggcgtttttgaaatgtagaacagagtgcttgcaaaatgtaataaatacacttgtgtactttgtgtacttattattaaaaaa

SEQ ID NO: 360 - DNA, 928 bp, Artificial Sequence
  INSL3
cccccagctgggacggcccaggcgcctataaagggggtccccgcttggccccggcgccacccaccaccatggacccccgtctgcccgcctgggcgctggtgctgctgggccctgccctggtgttcgcgttgggccccgcgcccaccccagagatgcgtgagaagttgtgcggccaccacttcgtacgcgcgctagtgcgcgtgtgcgggggcccccgctggtccaccgaagccaggaggcctgcgaccggaggcgaccagagggagtctcactctgtttcccaggctggtctcaaactcctgagctcaagtaatcctcccaccttgaccttccaaagtgttgggattagcgatgtgagttgctacagtggctggagagacgacatctgctccatgggctggtggccgacagtaatctcacgctgggacctggcctgcagcccctgccccagacctctcaccatcaccgccaccaccgtgcagctgccaccaaccctgcacgctactgctgcctcagtggctgtacccaacaagacctgctgaccctctgtccctactgattcctccttgggtgcagcctcagagtggcctgaggcccagagggtctggtctggtgagctcctgaggccacacagcaccataaagtctcgcatctacaggcctttgattacctcctgggatgggtgctcactatctaccccagaccaatgccacctgcagcctgtggagtcaactgcagaataaatcacaccctagccctggcttggaggatccccgctttcacagatgctggacactgacagccaaatgtcctcactccaggggagccccagacgctccgctccctgcatgtgtaacaccccttcttgctgtctcttagtaaataaacgacccaaagcagaaaaaaaaaaaaaaaaaaaaaaaaaaaa

SEQ ID NO: 361 - DNA, 1477 bp, Artificial Sequence
  PTPRC
agaacaacttttttgacttcctgcaaagaggacccttacagtatttttggagaagttagtaaaaccgaatctgacatcatcacctagcagttcatgcagctagcaagtggtttgttcttagggtaacagaggaggaaattgttcctcgtctgataagacaacagtggagaaaggacgcatgctgtttcttagggacacggctgacttccagatatgaccatgtatttgtggcttaaactcttggcatttggctttgcctttctggacacagaagtatttgtgacagggcaaagcccaacaccttcccccactggccatctgcaagctgaggagcaaggaagccaatccaagtcaccaaacctcaaaagtagggaagctgacagttcagccttcagttggtggccaaaggcccgagagcccctcacaaaccactggagtaagtccaagagtccaaaagctgaggaacttggagtctgatgttcaagagcaggaagcagccagcacgagagaaagatgaagaccagaagactcagcaagctcacttctcctaccttcttgtgcctgctttttctagccgtgctggcagttgcttggatgatgcccactcatattgggtgggggtgggggggttggggagggtctgcctcccccagtccactgactcaaatgttaatctcccttggcaatacgctcacaggcacacccaggaacaatactttgcatccttcaatccaatcaagttgacactcaatattaaccatcaaatactattataaggagaatgttgcatgattttccttctagtctgtttgtaattcacatctaatgaaagagtgagagtggacgataaagggaacttgttgaaacatttctctcaaagcaaaagggatcattggaagcaggcagacaccagaattggtttaacctaaaaataacaaattaataattatcaagtctataatgatgacagtgacttaatgtgaatagaaagaattctaaactctctccttccttcctccctcccttctttcctactttctttccactccctttctcccacccccttttcttttcctttcttttctcccaccctctctccctccctttcttttattcaatgcatagtagttgaaaaaatctaaagttagacctgattttacactgaagactagaggtagttactatcctattactgtacttagttggctatgctggcatgtcattatgggtaaaagtttgatggatttatttgtgagttatttggttatgaaaatctagagattgaagtttttcattagaaaataacacacataacaagtctatgatcattttgcatttctgtaatcacagaatagttctgcaatatttcatgtatattggaattgaagttcaattgaattttatctgtatttagtaaaaattaactttagctttgatactaatgaataaagctgggttttttatttaaaaaaaaaaa

SEQ ID NO: 362 - DNA, 2012 bp, Artificial Sequence
  PKIB
gactgcgcatgcgcgtcactagacgacacggctgtcttctttcctggagaatttctcaaggactgctggctggaaacttaacggctaatgtggatctgaccgtagtttgccaaattaagaaaacgtttttaccctgttgaagatttgctttaacttcaaaagtgatgacaagaaagtatggacaccccttcaggaccaacctgataagtcactgagacggggtttcaccgtgttagccaggatggtcttgatctcctgacctcgtgatccgcccgcctcggcctcccaaagtgctgggattacaggcgtgagccaccgcgccccggcagcaaaggtttttctttcgtttaaagatgacacactctgaaattaatttgattttgagatttgagaacttggacatacatacttcctatggaaggagtcatgctatactgaaaagacacttcatcaagataactctgggagaagcagaaaaccctgtgccagggacaggaaagataggagaaagaaagtttatcagaattttttaaacctgtctcagaaataacaacatattttaatcagagatttatgttgctatgaggacagattcatcaaaaatgactgacgtggagtctggggtcgccaattttgcatcttcagcaagggcaggccgccggaatgccttaccagacatccagagttcagctgccacagacggaacctcagatttgcccctcaaactggaggctctctccgtgaaggaagatgcaaaagagaaagatgaaaaaacaacacaagaccaattggaaaagcctcaaaatgaagaaaaatgaaggctcataatctatcaagagtgctgaatttctgcatgttgaaagacttagtggttctgttttcttgagacatttaatctggtggtaactgtggtaacattgcagccctaagcagcatgtgtatattagataattgtgttgtgatgctactcactttgattgcaatgatgatgtccaaggtaagctattaaaaggcaggttacttccaaatcgcactgaaggaaaaggttaagaataatacatgatcacagaaatgcataccactgtctgtaaacccaacaaaattcactgttctcttttggatttatttagcctgatgtatttttaattcaatttttatggtgatgggcaaatcattcttggtaaatgtaaatcaaacatgattgatttaaaacttcatggaatttgtagaaaattatggacatttttggtgagaaagaacaatagtcaaaactcacatggatagagtgtgtttgttttttgccaaaaatgccccagactttttcccaaacctcaaaaacgtcttggaaaaattgtaaaagtttgataacagaaacatctttaggatatttttgtctgacatattttgcttctagtatgtgcctactgtgatttttttcatgtggaaaatgcaaaatttgtaacaaaatggttatatggaacatgcctattaaatgaattttactatcttccctaactttggtctgtgtatgtgtgtgtgttttactttaatatgaattatacaaaatactagttgttttacactctcttttcttattcttagggcttttgtgtatgtctgacttgtttttaaataacttcctcagcaatgcagaccttaatttttatatttttttaaagtagctaacatagcagtaggcacttaagcatttagtcaatgatattggtagaaatagtaaaatacatcctttaaatatatatctaagcatatattttaaaaggagcaaaaataaaaccaaagtgttagtaaattttgatttattagatattttagaaaaataatagaattctgaagttttaaaaatgtcagtaattaatttattttcattttcagaaatatatgcatgcagttatgttttatttgattgttgacttaggctatgtctgtatacagtaaccaaataaactctttcactattaaagagatttcttactgaaaaaaaaaaaaaaaaa

SEQ ID NO: 363 - DNA, 4209 bp, Artificial Sequence
  KCNJ16
agattcccagggaggaactgtaggaacaaaccggtgtcaatggttaacccaggttcttggtgtctggagcttttctttcctttattattaactaaagagcattctctaccattgcccagctgaaagcacctagctcatagattctctgtggggagagtgaataaagaatgggggattgaggcacagagtgttaaaatagtgagacacaggattctaactggcagactggcactttatctcaattcttaactgctgtgttgcctctcactttaaagacatccacattccaccctgggccttgcccgtctggtgagcccaatctctgctggtcagtcacgcagttgaggtcagggaaggagtaactcaagatgattttgatgttgcagttttaaatttcactttgacttgagctgggaaatcctttggcctattataccatggatgctaaaaatgactaaaggtggagttagggggaaatgagtttaatgtgaagtagtactcctgtcagttctgtttgtcctgggaagtatacaaggaagaaaagcctccgtggaagagagagcaagcaccaggtgctgaaggttctaactgaaaacccaaaccaagaaatagcaacaagtctagaattcttactactacaaaactcacctggatccctaagggcacagcaaagaatgagctattacggcagcagctatcatattatcaatgcggacgcaaaatacccaggctacccgccagagcacattatagctgagaagagaagagcaagaagacgattacttcacaaagatggcagctgtaatgtctacttcaagcacatttttggagaatggggaagctatgtggttgacatcttcaccactcttgtggacaccaagtggcgccatatgtttgtgatattttctttatcttatattctctcgtggttgatatttggctctgtcttttggctcatagcctttcatcatggcgatctattaaatgatccagacatcacaccttgtgttgacaacgtccattctttcacaggggcctttttgttctccctagagacccaaaccaccataggatatggttatcgctgtgttactgaagaatgttctgtggccgtgctcatggtgatcctccagtccatcttaagttgcatcataaatacctttatcattggagctgccttggccaaaatggcaactgctcgaaagagagcccaaaccattcgtttcagctactttgcacttataggtatgagagatgggaagctttgcctcatgtggcgcattggtgattttcggccaaaccacgtggtagaaggaacagttagagcccaacttctccgctatacagaagacagtgaagggaggatgacgatggcatttaaagacctcaaattagtcaacgaccaaatcatcctggtcaccccggtaactattgtccatgaaattgaccatgagagccctctgtatgcccttgaccgcaaagcagtagccaaagataactttgagattttggtgacatttatctatactggtgattccactggaacatctcaccaatctagaagctcctatgttccccgagaaattctctggggccataggtttaatgatgtcttggaagttaagaggaagtattacaaagtgaactgcttacagtttgaaggaagtgtggaagtatatgcccccttttgcagtgccaagcaattggactggaaagaccagcagctccacatagaaaaagcaccaccagttcgagaatcctgcacgtcggacaccaaggcgagacgaaggtcatttagtgcagttgccattgtcagcagctgtgaaaaccctgaggagaccaccacttccgccacacatgaatatagggaaacaccttatcagaaagctctcctgactttaaacagaatctctgtagaatcccaaatgtagtcctaaattgcaattatgagggctaccactgaatcattttatctttcagccaatcaagtcgttgtaaacgtggcttttttgaaagtgttatggctatgttttatgatgatgctgggtaagtagagtaagttaaacttggtaaaagataatctaaaaattccatagttctcagttattaaaatttttcttgttcgccaattttgtattaagaatgctattaagcctaattgattaaaatttatcttttttattatcttacatgcttgtatcttcagttggaggtgtagtattcaaaaacggggaatgaaggcaggaaggaggctggaataaataaaaataaaaatagacaagtaagacagcataaataatacatttttaaacatgtcaacattgataatacaatgaagatttaccataaaaagtatcatatctaaccaagatatgcaaaagatgcattcagtaagctgtaacgttgagaaatgtaactgtgaaatcagctcaccagttcaagtcactaggtttgccacttggaccgtcttggtttcagcgagcatagcgagtggctgtaagaaattgtccatgccaccaattccactgctacttgcccaggtagtgatcagtgagagttagaagcaattttttctctaaccgatgaggcagaagaaaagttaacagtatttaaagcagcatttctctcttaacgttcctgggagactccaacaaatggagaccagaaacaaggcaaccacgaccttgctaggttctctgaggaggggactttctatgttcacgtcccaccttcttcgaggacatgaccaagggacaggatcatacagatgaggtgaggggatggttagcagcgataaacattctcagacccttggagagaaaccgttgctagcttgctggtcccgaaagattgcaactttggctgctacagaaaggatagaacctttttggggggagggtggggagggagatatttatttgtgcccagaagcagttatgtatgcttcttgtcttggttactgtacaagatacaaatgactcgagttgtggattgcaagaaactcttttattaaacttggaacaaccatttaaatgaaggattttgtgagatagaattcaattaaagcgatttgaatgcacagtaagtggataatctgagtacaatgaaatttcttaagttttagaacatgagataaagttgtatactctactttcatgttaaaatgttaatcatgattactttaagcccacatccactgagtaaagagtcactttaaactttataaatcaaagagatattaggaacattcagaattatttgtgttttgtttttgttttacattgttgctgcactggcaataagtatgtggcactgtttttatttgtttatgttatttaaatacacacccagacacacacacacacagtttttgctttttctggaaaatctttctttctcttctctctccatgaaaattaaaacacacaagtgaatgaagtaattacatagtccaagattagaaatacaagtaaaatatataggtataggtagatagagtgcctttctgtttcttttcttttcttttttctttttttgttcttccttcctttcttccctcctccccctcatccttccctttctccttcttttcccttttttttttttttttgacctgggagtaataaagttactttttaaatgcacgtatgcaatcttttattcctcttgttttatggataagagatttgttcaggtcaaaagttgcaaaactgttctgaagcttaatattagagacccaagtaagattgtttttagtcttgcttgaggaatgcacactccatttaaaaaattgtgcgctctgtagatttggattttacagcagcaattacttggctaaattagagtactgcaatcttgtaagtagaaaacagccaccatgacaataaacaaaaacacttaaaaatatttttagcttgttttacctacatctagtttcatttcatcttgctttgctttgttgactctgctaccgctgatgtttgccttgtcaatatcagaataggggcatcagtgtcccgtgaaatacattttgttgtgctatgagcctctgtaatcaaatgcttgtactcagaagagagtgtaaaatcagcatttctatgtaacatatatctctaattatctgtgtaattttataacatactttgacaaccccagtgagttacttaataataaagatcttaaaataatgcaaaaaaaaaaaaaaaaaaa

SEQ ID NO: 364 - DNA, 1588 bp, Artificial Sequence
  NRM
ggggaaggctgcgccaggcgggccggaagcctggcggtggcgtgcaggagccccgccctcctgggctggattcagccgggggcggggccgcgggcggggcctgtggcagcgggaatcccgaccccgcccctttccccacccctccatttctcgccatggcccctgcactgctcctgatccctgctgccctcgcctctttcatcctggcctttggcaccggagtggagttcgtgcgctttacctcccttcggccacttcttggagggatcccggagtctggtggtccggatgcccgccagggatggctggctgccctgcaggaccgcagcatccttgcccccctggcatgggatctggggctcctgcttctatttgttgggcagcacagcctcatggcagctgaaagagtgaaggcatggacatcccggtactttggggtccttcagaggtcactgtatgtggcctgcactgccctggccttgcagccccttatccttccacagctggtgatgcggtactgggagcccatacccaaaggccctgtgttgtgggaggctcgggctgagccatgggccacctgggtgccgctcctctgctttgtgctccatgtcatctcctggctcctcatctttagcatccttctcgtctttgactatgctgagctcatgggcctcaaacaggtatactaccatgtgctggggctgggcgagcctctggccctgaagtctccccgggctctcagactcttctcccacctgcgccacccagtgtgtgtggagctgctgacagtgctgtgggtggtgcctaccctgggcacggaccgtctcctccttgctttcctccttaccctctacctgggcctggctcacgggcttgatcagcaagacctccgctacctccgggcccagctacaaagaaaactccacctgctctctcggccccaggatggggaggcagagtgaggagctcactctggttacaagccctgttcttcctctcccactgaattctaaatccttaacatccaggccctggctgcttcatgccagaggcccaaatccatggactgaaggagatgccccttctactacttgagactttattctctgggtccagctccataccctaaattctgagtttcagccactgaactccaaggtccacttctcaccagcaaggaagagtggggtatggaagtcatctgtcccttcactgtttagagcatgacactctccccctcaacagcctcctgagaaggaaaggatctgccctgaccactcccctggcactgttacttgcctctgcgcctcaggggtccccttctgcaccgctggcttccactccaagaaggtggaccagggtctgcaagttcaacggtcatagctgtccctccaggccccaaccttgcctcaccactcccggccctagtctctgcacctccttaggccctgcctctgggctcagaccccaacctagtcaaggggattctcctgctcttaactcgatgacttggggctccctgctctcccgaggaagatgctctgcaggaaaataaaagtcagcctttttctacataaaaaaaaaaaaa

SEQ ID NO: 365 - DNA, 2411 bp, Artificial Sequence
  TFPI2
attactgacacaaacgctccctcagggcgtccccgtctggactacaggagaaagtttgggaggcaggttcaacttttcaacttggcggggaattcctctccctcttacacagtttgcagcgcgggggcggcggggtgacagtccccgtgcatgaatcagccacccctcaggctccgccccggcgggggtcggccggacgctcgccccgcataaagcgggcacccgggccgcctggagcagaaagccgcgcacctcctcccgccaggcgctttctcggacgccttgcccagcgggccgcccgaccccctgcaccatggaccccgctcgccccctggggctgtcgattctgctgcttttcctgacggaggctgcactgggcgatgctgctcaggagccaacagactacggaccctgccgggccctacttctccgttactactacgacaggtacacgcagagctgccgccagttcctgtacgggggctgcgagggcaacgccaacaatttctacacctgggaggcttgcgacgatgcttgctggaggatagaaaaagttcccaaagtttgccggctgcaagtgagtgtggacgaccagtgtgaggggtccacagaaaagtatttctttaatctaagttccatgacatgtgaaaaattcttttccggtgggtgtcaccggaaccggattgagaacaggtttccagatgaagctacttgtatgggcttctgcgcaccaaagaaaattccatcattttgctacagtccaaaagatgagggactgtgctctgccaatgtgactcgctattattttaatccaagatacagaacctgtgatgctttcacctatactggctgtggagggaatgacaataactttgttagcagggaggattgcaaacgtgcatgtgcaaaagctttgaaaaagaaaaagaagatgccaaagcttcgctttgccagtagaatccggaaaattcggaagaagcaattttaaacattcttaatatgtcatcttgtttgtctttatggcttatttgcctttatggttgtatctgaagaataatatgacagcatgaggaaacaaatcattggtgatttattcaccagtttttattaatacaagtcactttttaaaaaatttggatttttttatatataactagctgctattcaaatgtgagtctaccatttttaatttatggttcaactgtttgtgagactgaattcttgcaatgcataagatataaaagcaaatatgactcactcatttcttggggtcgtattcctgatttcagaagaggatcataactgaaacaacataagacaatataatcatgtgcttttaacatatttgagaataaaaaggactagcaaataaaactcattttgcatttaaaagttggattatattttagtcccaagaagacaaagtcgcagattaacaacactttaaaaatattactcccattttattgtgttagattgcagtacaatgaatgaataaggggatttatttaaaagatcttaactttcttgactgatttaaaaagctaatcaatttattaaagccagaaatgttctcctctgggaaagcaatttctatctatttatctaccaatccccactcacatgtatatgtttgtgtttacatagagatagatggttttaagggttttcctattgttaaattatttcctaagacattgtgggttggagaccactaaacttataaaaaaccaaggaaagtaaagtttttcaaatgtttatactgtttaaggtgtttatttatataaaccatgcatgagaaaccatgcataaatttaataatttaaatttcaccagtaaattatcattgattaaatatggtcataccaatgaaataggttttttctttctctgtaataaaacaatttttctaaattcttatgttttcatagcaagattaacatatttaattacaaattaaatatgcaaaatgacaaatgcgtttaccttttgcttgaacaatctttcatttaaaaatttatcccagttattttgacaaataggtatatgcctgagaactttgaatgatgctgaaagctagaagcaaaccaggtactcttcagtcagggactggttgaagattttatggatgaggagttagcaaaatatctatatatgcatatcttctgactcccaggatacataagaaacacagggcctagaacagtatgaataaacacacatatacacaaacatcacagaagatactaaagatattaaaaatgtttacctatagaggtttggagagaacagaggggtggacagttgtggagataatatttgtgtaaatataactgtgatatagtttttatcttggaccatgtaaatatttgacataattaataatcaaaattaaataaaaaagaaaaagc

SEQ ID NO: 366 - DNA, 1087 bp, Artificial Sequence
  JPH3
ggtcctgtctccagcgggagcgcgagacgctggtcaggctccgcggcgcagctcgaaaaggaataatcgcccccgattgactgaaattcctccggagccggcgccgcggccgcccgcgcccgagaccgcgctccggggccgcgtcctcctctcctccggaaaacgctcgcgacccagggccgccggcggccgcgactctgctgtgtcgatcgcctgagtccgttttcaccgtttgcgggatctggaaccgagttacatgcatgtccagtgggggcaggtttaattttgacgacggagggtcctactgtggaggctgggaggacggcaaggcgcacggccatggcgtctgcaccggccccaagggccaaggcgaatacaccggctcgtggagccacggcttcgaggtgctgggcgtctacacctggcccagcggcaacacgtaccagggcacctgggcgcagggcaagcgccacggcatcggcctggagagcaaggggaagtgggtgtacaagggcgagtggacgcacggattcaaggggcgctacggggtgcgggagtgcgcgggcaacggggccaaatacgaagggacctggagcaacgggctgcaggacggctacgggaccgagacctactcggacggagatgccaccgcattcggggcagagccggggccggaagccagggagctgcctgctgctgctgctgctgctgctgctgctgctgctgctgctgtaagatggtttctgtgcagggaaccttggccggctctgcagctgcccgcctgcctggactctccgatatccactcctcagtgcacctgacacgcatggagccggtcctttcctggaagccagaccccaaacaaactggcttccccgaccagtccactcccatgtgggagcttatcctcagaggcactgggtcctctgcctccctcgggcggctcgcctgtttcaggcatggatgcctgggaagggagtgagacgcagcaatgacttgtgcttctgccgagaataaaaatcctgagcgtacgtgtgctctagtcctccccaaaaaaaaaaaaaaaaaaaaaaaaaaaaaaaaaaaa

SEQ ID NO: 367 - DNA, 1859 bp, Artificial Sequence
  PNLDC1
gtgggcagcacgtgggcagcacgtgatagcgctgggcgactccgcggagctgcacggccatggacgtgggcgccgacgagttcgaggagagcctccctctgctgcaggagctcgtccaggaggccgacttcgtgggtctggacatagagttcacgggccttcgttctaacctgtctgggccccagcagatcagtctttttgatttgccatcggagtggtatctaaagacccgtcagagtgttcagcaatttacagtctgtcagattggattgtctgtgttttccgctattgaaggagaggcaaacaagtatatagcccattcttgtaacttctatctcttccctacaacgtttgggattttggactcagaattctccttccaggcttccagtgttcagtttttgaatcagtatggcttcaactataacaagtttctcaaaaacggaatcccatatatgaatgaagaacaggagaagaaaattagacacgatatcctgactgggaactggagagttcgcagctctccggataaagaccaaatcaaggtggtgattgacgaagtgacgcggtggctggagctggccaaggaaggcgactggatgactcttcctgggatcactggcttccaggcctttgaggtccaactggtgctgaggcaggccctccccaacatctggacggtgctgaaagatgagggggtggtagtgaagaaagtgagtaaacaacatcgttggtatcttcagaacacctcttgtgaccgagagagctgttggaaggaaaatattcttctctcagcaaggggtttttctgtctttttccaaatgctggtgaaagcccagaagcccttagtgggacataatatgatgatggacctgctgcacctccatgagaagttcttcagacccctcccagaaagctacgatcaatttaagcagaatatccacagcctatttcctgttctcattgataccaagagtgtaacaaaggatatctggaaggagatgaatttcccgagggtgtcgaatctttcggaagtctatgaagtcctgaacagtgacttgaatcccaccaagaattctggaccagagattgttcacgcgagcaggtgtgagaaatatgttgagacaaagtgcccccacgaagccgcgtatgatgccttcctctgtgggtcagttcttttgaaagtggcacacttgcttctacagaagatataccacatcgaccccgtgcccgagtcatcctttcctcagtaccttgacgtgctggctccttacgtgaaccaagtgaacctcatccgagcgggggtcccaaagatcaatttttctggtccagattatcccagtatccgacctcccatcctcatcctcagcgtcaaaaggtggcctggggtcagcgagcagcaagtctaccataagtttcagaatctctgcaagtttgatgtcaggcgactcacaagaagccagttcttactcctgaccaataagtttaaggatgcgcggaacatcctgaaggagtaccgggaccacccgaccctgtgcatctccctgtaccgctactggaggcactccccaaacgtcaactgcctgctccaagtctgtggcatagtgactgcctgggcccttctcgcgttcatccttggaagatctggtacctgagtgcagcgaggcctcctgcggccaccctcgggtccccatgctctctgggaggtgtgctgggtgtgttcgtgtaaatcagattctgtttgcagatggatctgtttggtcttttctagaaattctgttatgtcctgaacgtgaaattctgtcaacactctcaatgataaatcagtccttagatatcgtaaaaaaaaaaaaaaaaaa

SEQ ID NO: 368 - DNA, 3684 bp, Artificial Sequence
  GANAB
agacagctgcccggcggcgctcaggtcgaaccaatcataaggccggaaggggcgggaactaggatacgtggctgagcgcgcgcgatggggcgggaggtttggggtcaaggagcaaactctgcacaagatggcggcggtagcggcagtggcggcgcgtaggaggcggctttctgtctctggtcgtgatgagaacagtgtggagttaaccatggctgagggaccctacaagatcatcttgacagcacggccattccgccttgacctactagaggaccgaagtcttttgcttagtgtcaatgcccgaggactcttggagtttgagcatcagagggcccctagggtctctttctcggataaggttaatctcacgcttggtagcatatgggataagatcaagaaccttttctctaggcaaggatcaaaagacccagctgagggcgatggggcccagcctgaggaaacacccagggatggcgacaagccagaggagactcaggggaaggcagagaaagatgagccaggagcctgggaggagacattcaaaactcactctgacagcaagccgtatggccccatgtctgtgggtttggacttctctctgccaggcatggagcatgtctatgggatccctgagcatgcagacaacctgaggctgaaggtcactgagggtggggagccatatcgcctctacaatttggatgtgttccagtatgagctgtacaacccaatggccttgtatgggtctgtgcctgtgctcctggcacacaaccctcatcgcgacttgggcatcttctggctcaatgctgcagagacctgggttgatatatcttccaacactgccgggaagaccctgtttgggaagatgatggactacctgcagggctctggggagaccccacagacagatgttcgctggatgtcagagactggcatcattgacgtcttcctgctgctggggccctccatctctgatgttttccggcaatatgctagtctcacaggaacccaggcgttgcccccactcttctccctcggctaccaccagagccgttggaactaccgggacgaggctgatgtgctggaagtggatcagggctttgatgatcacaacctgccctgtgatgtcatctggctagacattgaacatgctgatggcaagcggtatttcacctgggaccccagtcgcttccctcagccccgcaccatgcttgagcgcttggcttctaagaggcggaagctggtggccatcgtagacccccacatcaaggtggactccggctaccgagttcacgaggagctgcggaacctggggctgtatgttaaaacccgggatggctctgactatgagggctggtgctggccaggctcagctggttaccctgacttcactaatcccacgatgagggcctggtgggctaacatgttcagctatgacaattatgagggctcagctcccaacctctttgtctggaatgacatgaacgaaccatctgtgttcaatggtcctgaggtcaccatgctcaaggatgcccagcattatgggggctgggagcaccgggatgtgcataacatctatggcctttatgtgcacatggcgactgctgatgggctgagacagcgctctgggggcatggaacgcccctttgtcctggccagggccttcttcgctggctcccagcgctttggagccgtgtggacaggggacaacactgccgagtgggaccatttgaagatctctattcctatgtgtctcagcttggggctggtgggactttccttctgtggggcggatgtgggtggcttcttcaaaaacccagagccagagctgcttgtgcgctggtaccagatgggtgcttaccagccattcttccgggcacatgcccacttggacactgggcgacgagagccatggctgttaccatctcagcacaatgatataatccgagatgccttgggccagcgatattctttgctgcccttctggtacaccctcttatatcaggcccatcgggaaggcattcctgtcatgaggcccctgtgggtgcagtaccctcaggatgtgactaccttcaatatagatgatcagtacttgcttggggatgcgttgctggttcaccctgtatcagactctggagcccatggtgtccaggtctatctgcctggccaaggggaggtgtggtatgacattcaaagctaccagaagcatcatggtccccagaccctgtacctgcctgtaactctaagcagtatccctgtgttccagcgtggagggacaatcgtgcctcgatggatgcgagtgcggcggtcttcagaatgtatgaaggatgaccccatcactctctttgttgcacttagccctcagggtacagctcaaggagagctctttctggatgatgggcacacgttcaactatcagactcgccaagagttcctgctgcgtcgattctcattctctggcaacacccttgtctccagctcagcagaccctgaaggacactttgagacaccaatctggattgagcgggtggtgataataggggctggaaagccagcagctgtggtactccagacaaaaggatctccagaaagccgcctgtccttccagcatgaccctgagacctctgtgttggtcctgcgcaagcctggcatcaatgtggcatctgattggagtattcacctgcgataacccaagggatgttctgggttagggggagggaaggggagcattagtgctgagagatattctttcttctgccttggagttcggccctccccagacttcacttatgctagtctaagacccagattctgccaacatttgggcaggatgagagggctgaccctgggctccaaattcctcttgtgatctcctcacctctcccactccattgataccaactctttcccttcattcccccaacatcctgttgctctaactggagcacattcacttacgaacaccaggaaaccacagggcccttgtcgccccttctctttcccttatttaggagccctgaactcccccagagtctatccattcatgcctcttgtatgttgatgccacttcttggaagaagatgagggcaatgagttagggctccttttccccttccctcccaccagattgctctcccacctttcatttcttcctccaggctttactcccctttttatgccccaccgatacactgggaccaccccttaccccggacaggatgaatggatcaaaggagtgaggttgctaaagaacatccttttccctctcattctacccttttcctctccccgattccttgtagagctgctgcaattcttagaggggcagttctacctcctctgtccctcggcagaaagacgtttccacacctcttaggggatgcgcattaaacttcttttgcccccttcttgtcccctttgaggggcacttaagatggagaaatcagttgtggtttcagtgaatcatggtcacctgtatttattgctaggagaagcctgagggtggggggagatgatcatgtgtgctcggggttggctggaagccctgggtggggggttgggggaggactaatggggagtcggggaatatttgtgggtattttttttacttcctcttggttcccagctgtgacacgttttgatcaaaggagaaacaataaagggataaaccataaataaaaaaaaaaa

SEQ ID NO: 369 - DNA, 3497 bp, Artificial Sequence
  MOBP
gtttttaagtggatcttcgctgaggactcatcaaaaacaccttgtgtaatgaaaaacccagatctataacctctccctatatattctgcatgcattgaagtaggctcaaaccctcagggacctggtatagacgcagaatctgtttcacacaacaactgctatttgaaggaaaaaaaaaaaaagaagcaaatgataccaagacaagctcataacagagatccaatcagcagatgtgtacggatgaaaatacagtgagatgagtcagaaaccggccaaggagggtcccagactctccaaaaaccagaagtactccgaacacttcagcatacactgctgcccgccgttcaccttcctcaattccaagaaggagatagtggatcggaaatacagcatctgtaagagcggctgcttctaccagaagaaagaggaggactggatctgctgcgcctgccagaagaccagctcctgccagcgtcgcttaagcagcagaggagagccctggctcccgcctccagcttcttttggccctctcagaaccagccgccgtgccaagtcccctcagaggcccaagcaacagccagctgcgccccccgcggtggtcagagcgccagccaagccacggtcccctccgaggtctgagcgtcagccacggtcccctccgaggtctgagcgtcagccacggtcccctccgaggtctgagcgtcagccacggtcccctccgaggtctgagcgtcagccacgtccccgcccagaggtccgaccaccgccagccaagcagcgtccccctcagaagtccaagcaacagccgcgcagcagccccctcagagggccaggcgccagccgtggggggtcccccgtcaaagcttctaggttctgattgaaaaggaagatcaggccaaccccaaagaagaagtgaccaaggaggagtttaaactgaatgaacaacctcggctcctggactcattgcttcacaacccatctacccctggatgaagttatctggcttcaaatattatgcaggggcaaacacctgctgatgtggcaactgctgatgctcatggtccccatggcatgggggcctcagggcagcctgcctggaggtgagcagggctatctctgtgtgttgtactccagtcagggggttccagcagcacccgcaggctctagagctcaatgcacagttctttttgtttcacctgcagtcctttcttctccaggatatgcacaggcctccagggtctttcatggctcagggtcagggtggctcaagtgccaacccacatgttgtcctccaaatattcccttctatccctggcatgctgttgctgagctcaacttttaatttttgactttctcctttgtaattaatctctatctgggtttctctctttctctgtgccatttggtttccttaattagttccctgtgccagcccatagtcagagccataattggctctggggaagatccaagttattttctgagtaagatattaggcttccatatgatccagagatgcaaagaaatccctagagagtgtaggagttgtctaaatccatgtgtcagatgtagccaacgaattatgtcagaagcagagagaaaaggcctgaaaagcagctctctcccactcctcaggcccttgtctccaaccttacatgaggctttttgaacatctcctcctggcccagctggggtgagagcaagtcctcgaaggcactgcctttgagccttgctcagcccatctgaactatcccaactctagaattgactgctttcgaattgtgtgaccttgggaatgttatctggcttcaaccacaatgccctacccccagctcctctcccaaatgatcctagatacagggctgcttccccccgaccctaccccacctcgggacacaggctcatggcctcatggcacttcaccaccagaagtggtgctcagagttcctatttccacatctaaccccctaattcctgggaaagtctgaggcctggtccccccagtgctttccctggctggcctctccacattttcatctgatggtggagtgagatcaggaaaaataggacaggagctttgccttgggggagaagagagttaagtgtggaaaggggtgagttataggaggttaagcagtccaagatttctctctctgtgtaggaggccatttcctgatgtgaggggtctgaacccaattatgatgggacagggttgggcattgacttcccatctcttctctctgtttttctcccactatctgtagcccaaaactcttatggaggactttgatctttagtataggctattggtcagggccataggaactaaccccgatcctcactccaccaggatctaccacatcccctacacacaaacacatgctgtggggagggagttttcccctgggtcaagttgaggatccttagatcaccttgtgctcctgtggactggtgtgtgcgtgtgtgtgtgtgtgtgtgtgtgtgtgtgtgtgtgtgtgtgtgtgtgtgtatgttgggaaacttagctttcagagaatgtctatgggctctcattttctctctcacacaaaaatactcgggacttctccaagtccctgaggagcctgaccactgaagctgatcatgagatgactgtatgctgacacacccccttcaggggcctggccttgacttagggctgcactgtatcctcagcaacggccttgcaggagccccttttggactgctttccctattcagcccagagttggggtggtgggagaagaggggttggagtgaatccatctctattcaaattccagctgggattactctaggagtcttcctggcttgttttgggcccaaacttagctacattgtttattggctcccaaagtcgggattgaagagtgaaaagatgcaggcaatgaatccttctgcacactcctccccaacctttccagcgcttttctacttaggaggccagtggaagggaggagaggccatgccctagcccacaggggacaaggttcattgttcttccaggcttggttcactctgcttttgattcagaagctctttccctacccagcaagactacactttcttgccttctttctattttttctttttgtgcgtataaatggtatgttgtgatatattctcagtgcttgtgcccaccttggaactctgttcttgctcttcattccgcatgtgatactctggtccaagatcttggccaggtgccttctgctcaaatatcgtctcagaggtgcttcccttgaaaactcggtgctgtttccatagttactctatttgatcactctaagtttggttgtcttcatagcacttgtcaccctctggaactattctattcatttatttacttgtttaatgcttggctcttttcccctcctaacgtaaactccatgattgccaacacctgtttacttactacagttccccctccccccacattcctgacactagtaagaaccaataaacacttgttgacggaa

SEQ ID NO: 370 - DNA, 3516 bp, Artificial Sequence
  TAGAP
atactattgaccacattatgcggccaacgatacccattttcttacctggatctttgcttcttaacactgtagtctaatttttctcgttgccttgttttcttggctgtagaagttaagaagagaaagaaggtgctgtcctggccctttctcatgagaaggctctcccctgcatcagatttttctggggctttggagacagacttgaaagcatcgctatttgatcagcccttgtcaattatctgcggtgacagtgacacactccccagacccatccaggacattctcactattctatgccttaaaggcccttcaacggaagggatattcaggagagcagccaacgagaaagcccgtaaggagctgaaggaggagctcaactctggggatgcggtggatctggagaggctccccgtgcacctcctcgctgtggtctttaaggacttcctcagaagtatcccccggaagctactttcaagcgacctctttgaggagtggatgggtgctctggagatgcaggacgaggaggacagaatcgaggccctgaaacaggttgcagataagctcccccggcccaacctcctgctactcaagcacttggtctatgtgctgcacctcatcagcaagaactctgaggtgaacaggatggactccagcaatctggccatctgcattggacccaacatgctcaccctggagaatgaccagagcctgtcatttgaagcccagaaggacctgaacaacaaggtgaagacactggtggaattcctcattgataactgctttgaaatatttggggagaacattccagtgcattccagtatcacttctgatgactccctggagcacactgacagttcagatgtgtcgaccctgcagaatgactcagcctacgacagcaacgaccctgatgtggaatccaacagcagcagtggcatcagctctcccagcaggcagccccaggtgcccatggccacagctgctggcttggatagcgcgggcccacaggatgcccgagaggtcagcccagagcccattgtgagcaccgtggccaggctgaaaagctccctcgcacagcccgataggagatactcagagcccagcatgccatcctcccaggagtgcctcgagagccgggtgacaaaccaaacactaacaaagagtgaaggggacttccccgtgccccgggtaggctctcgtttggaaagtgaggaggctgaagacccatttccagaggaggtcttccctgcagtgcaaggcaaaaccaagaggccggtggacctgaagatcaagaacttggccccgggttcggtgctcccgcgggcactggttctcaaagccttctccagcagctcgctggacgcgtcctctgacagctcgcccgtggcttctccttccagtcccaaaagaaatttcttcagcagacatcagtctttcaccacaaagacagagaaaggcaagcccagccgagaaattaaaaagcactccatgtctttcacctttgcccctcacaaaaaagtgctgaccaaaaacctcagcgcgggctctgggaaatcgcaagactttaccagggaccacgtcccgaggggtgtcagaaaggaaagccagcttgccggccgaatcgtgcaggaaaatgggtgtgaaacccacaaccaaacagcccgcggcttctgcctgagaccccacgccctctcggtggatgatgtgttccagggagctgactgggagaggcctggaagcccaccctcttatgaagaggccatgcagggcccggcagccagactagtggcctccgagagccagaccgtggggagcatgacggtggggagcatgagggcgaggatgctggaggcgcactgcctcctaccccctcttccacctgctcaccacgtagaggactcaagacacaggggcagcaaagagccactccctggccacggactctctcccctgcctgagcgatggaaacagagcagaactgtccatgcttctggggactctctggggcacgtgtctggcccagggagacctgagctcctcccgctgaggaccgtctccgagtccgtgcagaggaataagcgggactgtctcgtgcgacgatgtagccagccggtctttgaggctgaccaattccaatatgccaaagaatcgtatatttaggagggaggccatacgccatgccatagcttgtgctatctgtaaatatgagacttgtaaagaactgcctgtagattgtttttaaaaggtcttgaataagctccttgagaaagttgtggaaagccctcctcagtgaggatagctacaccatggccatggcgcatcagatagtctctgtgtacctggatttgtgcaatatgtaaaaatgtatcaaatgtattatagataaggtgttaggtgcaaaggatgtctaataatccctgcacacgttttgaacttgcagtgaagtacactgctgttccttgcttcctggggcacttttctcttggttagtgtttaaaaattatcttcgcttttttaatgtggcctcaaatgtcatgccaattttcacatcttccacaaactccatttagggagaaatgtttaaatctctggtataagtttactccataccagagtaaactatatattactctatataagcagtcttgcaataactaatcaccaccatagaagaaagaaacagactgcaaggaacagagttgagtgtctggagtcatcaaaggcattaaaaactccagtaaaagctggggccgtagcaaaaatcatgaaaaacacttcaacgtgtcctttcaatcatccaattaaatgtgggtagattaatgaaaatgtattacatcaatattaactcatctatagcactttgagtatctttgtagttcatgatatcctatcctataatgtggaggtaaatgattttatatgcattgggggtcatatataaaacttcaatgtaatttcactacaataaattgccttccttatttgaaagtaaaaatgttctttttttattgacatgttaactcctttccctcaattaatagaaatccactaagaaaatcattcacatattggttcactcaacaagcatttattaaatatatattcactattctagactaatagcaagaccggggatcttgtttaggaagaagcagtccctgttctccagaatttgcaaaaccattaaaaaagcacctactttaagccattttttttcagcaaggagtcattctgccagaaaaatgtagtacacaaatacaggataatataacaaatgtaaaatttctcatttctagtgaattaaactttccagtaattttacatctcacctcattcttatgatgctcagtttgcttaattattggcaaacataatggtaaaatgtttgtactgtattagagctttactgttcgattattaagatatttatccagtatcttagagatgctggacttcaattttccttattttatctttttaaaataaaatatcatgcatgcttctgatttgttatagaaa

SEQ ID NO: 371 - DNA, 13698 bp, Artificial Sequence
  CSMD2
gagagcgcagcgcgcctctccccggccgggcggacacttggttcattccagccgcagaagctcagggctcccgcgtaccgggattttttccgagcagaaaaaagctccagagctctcctgacctcctttctcctcggcggcgagcggagcctctccctcggcgctgccggccgcgccatgccgcgctcgcggggacgggagctggggcgctgcggctgccccgcggggagggctcgcggcgaaaccgggatttcggcgcttgtgccgggcgccgggagccgctggggccgcccgccgccgccaacgccgccgcctctgctgctgttgctgggctgtgggttgctcagcgtctcggccgccgcgggccagaactgcacgttccaactgcacggtcccaatgggacagttgagagcccagggttcccatatggctaccccaattacgccaactgcacgtggaccatcaccgcggaagagcagcacagaatccagcttgtgttccagtcctttgccctggaagaggactttgatgtcctgtcggtgtttgatggtccaccccagccagagaatctgcgtacgaggctcacaggctttcagctgccagccaccattgttagtgcagccaccaccctctctctgcgcctcatcagcgactatgcagtcagtgcccaaggcttccacgccacctatgaagttctccccagccacacatgtgggaacccagggaggctgcccaatggcatccagcagggttcaaccttcaacctcggtgacaaggtccgctacagctgcaaccttggcttcttcctggagggccacgccgtgctcacctgccacgctggctctgagaacagcgccacgtgggacttccccctgccttcctgcagagctgatgatgcctgtggtgggaccctgcggggccagagtggcatcatctccagcccccacttcccctcggagtaccataacaatgccgactgcacatggaccatcctggctgagctgggggacaccatcgccctggtgtttattgacttccagctggaggatggttacgactttctggaagtcactgggacagaaggctcctccctctggttcaccggagccagcctcccagcccccgttatcagcagcaagaactggctgcgactgcacttcacatcggatggcaaccaccggcagcgcggattcagtgcccaataccaagtcaagaagcaaattgagttgaagtctcgaggtgtgaagctgatgcccagcaaagacaacagccagaagacgtctgtgttaactcaggttggtgtgtcccaaggacataatatgtgtccagaccctggcatacccgaaaggggcaaaagactaggctcggatttcaggttaggatccagcgtccagttcacctgcaacgagggctatgacctgcaagggtccaagcggatcacctgtatgaaagtgagcgacatgtttgcggcctggagcgaccacaggccagtctgccgagcccgcatgtgtgatgcccaccttcgaggcccctcgggcatcatcacctcccccaatttccccattcagtatgacaacaatgcacactgtgtgtggatcatcacagcactcaacccctccaaggtgatcaagctcgcctttgaggagtttgatttggagaggggctatgacaccctgacggtcggtgatggtggtcaggatggggaccagaagacagttctctacatcctgacaggtacatcggtcccggatctcattgtcagcaccaatcatcaaatgtggctcctcttccagactgatggcagtggcagttccctgggattcaaggcttcttatgaagagatcgagcagggcagttgcggtgaccctggcatacctgcatatggccggagggaaggctcccggtttcaccacggtgacacactcaagtttgagtgccagcccgcctttgagctggtgggacagaaggcaatcacatgccaaaagaataaccaatggtcggctaagaagccaggctgcgtgttctcctgcttcttcaacttcaccagcccgtctggggttgtcctgtctcccaactacccagaggactatggcaaccacctccactgtgtctggctcatcctggccaggcctgagagccgcatccacctggccttcaacgacattgacgtggagcctcagtttgatttcctggtcatcaaggatggggccaccgccgaggcgcccgtcctgggcaccttctcaggaaaccagcttccctcctccatcacaagcagtggccacgtggcccgtctcgagttccagactgaccactccacagggaagaggggcttcaacatcacttttaccaccttccgacacaacgagtgcccggatcctggcgttccagtaaatggcaaacggtttggggacagcctccagctgggcagctccatctccttcctctgtgatgaaggcttccttgggactcagggctcagagaccatcacctgcgtcctgaaggagggcagcgtggtctggaacagcgctgtgctgcggtgtgaagctccctgtggtggtcacctgacttcgcccagcggcaccatcctctctccgggctggcctggcttctacaaggatgccttgagctgtgcctgggtgattgaggcccagccaggctaccccatcaaaatcaccttcgacagattcaaaaccgaggtcaactatgacaccctggaagtacgcgatgggcggacttactcagcgcccttgatcggggtttaccacgggacccaggttccccagttcctcatcagcaccagcaactacctctacctcctcttctctaccgacaagagtcactcggacatcggcttccagctccgctatgagactataacactgcagtcagaccactgtctggatccaggaatcccagtaaatggacagcgtcatgggaatgacttctacgtgggcgcgctggtgaccttcagctgtgactcgggctacacattaagtgacggggagcctctggagtgtgagcccaacttccagtggagccgggccctgcccagttgtgaagctctctgtggtggcttcattcaaggctccagtgggaccatcttgtcgccagggttccctgacttctaccccaacaacttgaactgcacctggattatcgaaacatctcatggcaagggtgtgttcttcactttccacaccttccacctggaaagtggccatgactacctcctcatcactgagaacggcagcttcacccagcccctgaggcagctaactggatctcggctgccagctcccatcagcgctgggctctatggcaacttcactgcccaggtccgcttcatctctgatttctccatgtcatatgaaggattcaacatcaccttctcagagtacgacttggagccctgtgaggagcccgaggtcccagcctacagcatccggaagggcttgcagtttggcgtgggcgacaccttgaccttctcctgcttccccgggtaccgtctggagggcaccgcccgcatcacgtgcctggggggcagacggcgcctgtggagctcgcctctgccaaggtgtgttgctgagtgtgggaattcagtcacaggcactcagggtactttgctgtcccccaactttcctgtgaactacaataacaatcatgaatgcatctactccatccagacccagccagggaagggaattcagctgaaagccagggcattcgaactctccgaaggagatgtcctcaaggtttatgatggcaacaacaactccgcccgtttgctgggagtttttagccattctgagatgatgggggtgactttgaacagcacatccagcagtctgtggcttgatttcatcactgatgctgaaaacaccagcaagggctttgaactgcacttttccagctttgaactcatcaaatgtgaggacccaggaacccccaagtttggctacaaggttcatgatgaaggtcattttgcagggagctccgtgtccttcagctgtgaccctggatacagcctgcggggtagtgaggagctgctgtgtctgagtggagagcgccggacctgggaccggcctctgcccacctgtgtcgccgagtgtggagggacagtgagaggagaggtgtcggggcaggtgctgtcacccgggtatccagctccctatgaacacaatctcaactgcatctggaccatcgaagcagaggccggctgcaccattgggctacacttcctggtgtttgacacagaggaggttcacgacgtgctgcgcatctgggatgggcctgtggagagcggggttctgctgaaggagctgagtggcccggccctgcccaaggacctgcatagcaccttcaactcggtcgtcctgcagttcagcactgacttcttcaccagcaagcagggctttgccattcaattttcagtgtccacagcaacgtcctgcaatgaccctgggatcccgcagaatgggagtcggagtggtgacagttgggaagccggcgactccacagtgttccagtgtgaccctggctacgcgctgcagggaagtgcagagatcagctgtgtgaagatcgagaacaggttcttctggcagcccagcccgccaacatgcatcgctccctgcgggggagacctgacaggaccatctggagtcatcctctcaccaaattacccagaaccctacccgccaggcaaggagtgtgactggaaagtgaccgtctcaccagactacgtcatcgccctggtatttaacatctttaacctggagcctggctatgacttcctccatatctacgacggacgggactctctcagccctctcataggaagcttctatggctcccagctcccaggccgcattgaaagcagcagcaacagcctcttcctcgccttccgcagcgatgcatctgtgagcaatgctggcttcgtcattgactatacagaaaacccgcgggagtcatgttttgatcctggttccatcaagaacggcacacgggtggggtccgacctgaagctgggctcctccgtcacctactactgccacgggggctacgaagttgagggcacctcgaccctgagctgcatcctggggcctgatgggaagcccgtgtggaacaatccccggccagtctgcacagccccctgtgggggacagtatgtgggttcggacggagtggtcttgtcccccaactacccccagaactacaccagtggacagatctgcttgtattttgttactgtgcccaaggactatgtggtgtttggccagttcgccttctttcacacggccctcaacgacgtggtggaggttcacgacggccacagccagcactcgcggctcctcagctccctctcgggctcccatacaggagaatcactgcccttggccacctccaatcaagttctcattaagttcagcgccaaaggcctcgcaccagccagaggcttccactttgtctaccaagcggttcctcgaaccagcgccacgcagtgcagctctgtgccggaaccccgctatggcaagaggctgggcagtgacttctcggtgggggccatcgtccgcttcgaatgcaactccggctatgccctgcaggggtcgccagagatcgagtgcctccctgtgcctggggccttggcccaatggaatgtctcagcgcccacgtgtgtggtgccgtgtggaggcaacctcacagagcgcaggggcaccatcctgtcccctggcttcccagagccgtacctcaacagcctcaactgtgtgtggaagatcgtggtccccgaaggcgctggcatccagatccaagttgtcagttttgtgacagagcagaactgggactcgctggaagtatttgatggtgcagataacactgtaaccatgctggggagtttctcaggaacaaccgtgcctgcccttctgaacagcacctccaaccagctctaccttcatttctactcagatatcagcgtatctgcagctggcttccacttggagtacaaaacggtgggcctgagcagttgtccggaacctgctgtgcccagtaacggggtgaagactggcgagcgctacttggtgaatgatgtggtgtctttccagtgtgagccgggatatgccctccagggccacgcccacatctcctgcatgcccggaacagtgcggcgatggaactaccctcctccactctgtattgcacagtgtgggggaacagtggaggagatggagggggtgatcctgagccccggcttcccaggcaactaccccagtaacatggactgctcctggaaaatagcactgcccgtgggctttggagctcacatccagttcctgaacttctccaccgagcccaaccacgactacatagaaatccggaatggcccctatgagaccagccgcatgatgggaagattcagtggaagcgagcttccaagctccctcctctccacgtcccacgagaccaccgtgtatttccacagcgaccactcccagaatcggccaggattcaagctggagtatcaggcctatgaacttcaagagtgcccagacccagagccctttgccaatggcattgtgaggggagctggctacaacgtgggacaatcagtgaccttcgagtgcctcccggggtatcaattgactggccaccctgtcctcacgtgtcaacatggcaccaaccggaactgggaccaccccctgcccaagtgtgaagtcccttgtggcgggaacatcacttcttccaacggcactgtgtactccccggggttccctagcccgtactccagctcccaggactgtgtctggctgatcaccgtgcccattggccatggcgtccgcctcaacctcagcctgctgcagacagagccctctggagatttcatcaccatctgggatgggccacagcaaacagcaccacggctcggcgtcttcacccggagcatggccaagaaaacagtgcagagttcatccaaccaggtcctgctcaagttccaccgtgatgcagccacaggggggatcttcgccatagctttctccgcttatccactcaccaaatgccctcctcccaccatcctccccaacgccgaagtcgtcacagagaatgaagaattcaatataggtgacatcgtacgctacagatgcctccctggctttaccttagtggggaatgaaattctgacctgcaaacttggaacctacctgcagtttgaaggaccacccccgatatgtgaagtgcactgtccaacaaatgagcttctgacagactccacaggcgtgatcctgagccagagctaccctggaagctatccccagttccagacctgctcttggctggtgagagtggagcccgactataacatctccctcacagtggagtacttcctcagcgagaagcaatatgatgagtttgagatttttgatggtccatcaggacagagtcctctgctgaaagccctcagtgggaattactcagctcccctgattgtcaccagctcaagcaactctgtgtacctgcgttggtcatctgatcacgcctacaatcggaagggcttcaagatccgctattcagccccttactgcagcctgcccagggctccactccatggcttcatcctaggccagaccagcacccagcccgggggctccatccactttggctgcaacgccggctaccgcctggtgggacacagcatggccatctgtacccggcacccccagggctaccacctgtggagcgaagccatccctctctgtcaagctctttcctgtgggcttcctgaggcccccaagaatggaatggtgtttggcaaggagtacacagtgggaaccaaggccatgtacagctgcagtgaaggctaccacctccaggcaggcgctgaggccactgcagagtgtctggacacaggcctatggagcaaccgcaatgtcccaccacagtgtgtccctgtgacttgtcctgatgtcagtagcatcagcgtggagcatggccgatggaggcttatctttgagacacagtatcagttccaggcccagctgatgctcatctgtgaccctggctactactatactggccaaagggtcatccgctgtcaggccaatggcaaatggagcctcggggactctacgcccacctgccgaatcatctcctgtggagagctcccgattccccccaatggccaccgcatcggaacactgtctgtctacggggcaacagccatcttctcctgcaattccggatacacactggtgggctccagggtgcgtgagtgcatggccaatgggctctggagtggctctgaagtccgctgccttgccactcagaccaagctccactccattttctataagctcctcttcgatgtactctcttccccatccctcaccaaagctggacactgtgggactcctgagcccattgtcaacggacacatcaatggggagaactacagctaccggggcagtgtggtgtaccaatgcaatgctggcttccgcctgatcggcatgtctgtgcgcatctgccagcaggatcatcactggtcgggcaagacccctttctgtgtgccaattacctgtggacacccaggcaaccctgtcaacggcctcactcagggtaaccagtttaacctcaacgatgtggtcaagtttgtttgcaaccctgggtatatggctgagggggctgctaggtcccaatgcctggccagcgggcaatggagtgacatgctgcccacctgcagaatcatcaactgtacagatcctggacaccaagaaaatagtgttcgtcaggtccacgccagcggcccgcacaggttcagcttcggcaccactgtgtcttaccggtgcaaccacggcttctacctcctgggcaccccagtgctcagctgccagggagatggcacatgggaccgtccccgcccccagtgtctcttggtgtcctgtggccatccgggctccccgcctcactcccagatgtctggagacagttatactgtgggagcagtggtgcggtacagctgcatcggcaagcgtactctggtgggaaacagcacccgcatgtgtgggctggatggacactggactggctccctccctcactgctcaggaaccagcgtgggagtttgcggtgaccctgggatcccggctcatggcatccgtttgggggacagctttgatccaggcactgtgatgcgcttcagctgtgaagctggccacgtgctccggggatcgtcagagcgcacctgtcaagccaatggctcgtggagcggctcgcagcctgagtgtggagtgatctcttgtgggaaccctgggactccaagtaatgcccgagttgtgttcagtgatggcctggttttctccagctctatcgtctatgagtgccgggaaggatactacgccacaggcctgctcagccgtcactgctcggtcaatggtacctggacaggcagtgaccctgagtgcctcgtcataaactgtggtgaccctgggattccagccaatggccttcggctgggcaatgacttcaggtacaacaaaactgtgacatatcagtgtgtccctggctatatgatggagtcacatagagtatctgtgctgagctgcaccaaggaccggacatggaatggaaccaagcccgtctgcaaagctctcatgtgcaagccacctccgctcatccccaatgggaaggtggtggggtctgacttcatgtggggctcaagtgtgacttatgcctgcctggaggggtaccagctctccctgcccgcggtgttcacctgtgagggaaatgggtcctggaccggagagctgcctcagtgtttccctgtgttctgcggggatcctggtgtcccgtcccgtgggaggagagaggaccgaggcttctcctacaggtcatctgtctccttctcctgccatccccctctggtgctggtgggctctccacgcaggttttgccagtcagatgggacatggagtggcacccagcccagctgcatagatccgaccctgaccacgtgtgcggaccctggtgtgccacagtttgggatacagaacaattctcagggctaccaggttggaagcacagtcctcttccgttgtcaaaaaggctacctgcttcagggctccaccaccaggacctgcctcccaaacctgacctggagtggaaccccacctgactgtgtcccccaccactgcaggcagccagagacgccaacgcatgccaacgtcggggccctggatttgccctccatgggctacacgctcatctactcctgccaggagggcttctccctcaagggtggctccgagcaccgcacctgcaaggcggatggcagctggacaggcaagccgcccatctgcctggaggtccggcccagtgggagacccatcaacactgcccgggagccaccgctcacccaagccttgattcctggggatgtttttgccaagaattccctgtggaaaggggcctatgaataccaggggaagaagcagccagccatgctcagagtgactggcttccaagttgccaacagcaaggtcaatgccaccatgatcgaccacagtggcgtggagctgcacttggctggaacttacaagaaagaagattttcatctcctactccaggtgtaccagattacagggcctgtggagatctttatgaataagttcaaagatgatcactgggctttagatggccatgtctcgtcagagtcctccggagccaccttcatctaccaaggctctgtcaagggccaaggctttgggcagttcggctttcaaagactggacctcaggctgctggagtcagaccccgagtccattggccgccactttgcttccaacagcagctcagtggcagccgcgatcctggtgcctttcatcgccctcattattgcgggcttcgtgctctatctctacaagcacaggagaagacccaaagttcctttcaatggctatgctggccacgagaacaccaatgttcgggccacatttgagaacccaatgtacgaccgcaacatccagcccacagacatcatggccagcgaggcggagttcacagtcagcacagtgtgcacagcagtatagccacccggcctggccgccaccaccgccaccgagagccccgcctccagcagccgttccccagggggcaggaagtaggctcccctgagcacagtgcccagtgcccatcttcgttcgtctccttgcctgtgtctgctactgctgggactcaggccctcgccctgccgccatctatgccagttaccctggagaggactcctgccgtgtcctgaaaaggcagaaaaggaagaggggctgcagacagaggaagaaagtttatggatttaaaatagcaaagcaacttgtggatctgtgtgtgtgtgtgtgtgtatgggcctgatcacacacaaacacacacacctctccttcattcacgtcctatggaagagaccataaaggcttcaaaactagaagtgcgcatgaaggatgcttcatgccctgttccccacacagagaagagatgaagagggggaggtacggtcagctttcaaaacaatatgccccccgcccatcccatgtgtgaggacatggtgactcggtgactgtaacagtaggacacatcccatcatgcggtcagagtgcagaaacccggtcagcgtgcagaaaccagctgtctgctgatgaacggcccatctgcacagcggcagcaaggattaccccaagggcaggaaaaaagtctttggaaatagattgaaaatcagtttctttatttttttcaaacactgttttattgagttctaaacccagtggattaaaaagtcatttgggtcctgggaagcactgggaaagaagggagagccggggaggatagggcaggagtctggccaggagcccaaggtcaagtctggctgtcaactgacaaagagaagagaagacaagtctgtggcccagacaggatgccaagtctgggggcagcagcagggtccttgagagaacaggggagcaagcctgccccagtacccaaaaaacaatggctatcatgtactggggttattctctgtgcctgacactttacctgtagtatttctagtctgcacaataacaccaaaatgtaggatttgttattcccctttgacagatgagaaaacagaagcctgcaaaggtaaagacagagttaggaagtgtggagtcagaatgcaaacccagatcagtctgccccaaagtccactacaccagctgccagaaaccctgttctagaaggggcagctaagaagggaggagccgatgaatctctacagtagcactgtggccaggtctggaaagccaggcaagacacctgtgtgtcctatctgggttctgctgtctccgcgtaggcagcttcggggcaaggattcaactccccaggcctcccacggttggtgctggctccttggctcccagcagccgctgaccatagccagcaaaagacctggcaggtcctgaatcaaaacaacagagtggctgaaagtcacacctctccagctccttgcgagtgggtttgattgattttgacagctatatcatgcttgggtcgttcatgaattccatgagaattgttgggaagttcatgagtttaggaatcaaagtatagcatttagggccactttctctgtcctcgggaaggcccccacaagcttaagcccctgtatacgtgtgacatgctggcctcagagattcatgtcacatattgaaatagcaaatagaaatgtgcaggagcggagggacagcgacacctggttcttaagcaaattctagattggaacaattagaagatctgactgatgttaagagtggccagaggaaagtgagaggcgtccatttccagcagacacaatggaggctgacagaggcaggagcctacccctggccacaccacctctgggacacggcacccccctgggcctggagggagagggccaatccagacacactcacactctcatctctttccttggctggaaacaagtgcaggaagctcccctcccaatttcttatgctcccttcccccttacactcctctccttcgactgctcccttcccccttcttatgcccctctcagaccacccagcggatgcctattcccgccccccacccctcccctgcgtctccttgtaaagttccatgagatgctcgaggagcacctgctggtggggcacccagcactctgctgggcatcaccctccgcacccctgacatttctctccacctccagaggcttggaagggaacagggcagatgaggcccttcacccaccatctacgccatatacccatcaccatcccatgaggaaaaaaaaaaaagtaaaacaaagacaaaaaaaatcttttgtacagagatatatttttattatacaaagtttgtacagtaccaaaaaagaaaaaaaaaaaggtgtaaatttttttttcattattgtaggtaaacggtagtggaagccttttttgtaaatgtaataaaatgtataaatatggttttcagaaaacatcaagtgctgtaaatatgtaatctacacaccttcttggcttgtctgcagtatatacatttaatttatctgtctctgtatatgaggcttccccctggggtcctgcattatggtactttcctgaatttgaaagcaattttaaattttttgaattcaaataaaatataaatttttgcattggttttcttac

SEQ ID NO: 372 - DNA, 5699 bp, Artificial Sequence
  PPFIA2
gaaccgagctttgcttcccaaagcaaaatttgtaatatgccatttttccgatggacgcttctccttttggctgctgacggagccacgggaagatgccgagctcctgccacgccaccgggccggggcacgttccgggagggcgccggggcacgcgtgtgtctgagctgcctttctcctcccgttgctagggaaatggtccaggagtgctgggtgtgagcctcccttctcctcaagccggagactgcggttgtcattgatcaattgaagaagcaaggacccgaaatcacagacattagcaatgatgtgtgaagtgatgcccacgattaatgaggacaccccaatgagccaaagggggtcccaaagcagtggctcggactcagactcccattttgagcagctgatggtgaatatgctagatgaaagggatcgtcttctagacacccttcgggagacccaggaaagcctctcacttgcccagcaaagacttcaggatgtcatctatgaccgagactcactccagagacagctcaattcagccctgccacaggatatcgaatccctaacaggagggctggctggttctaagggggctgatccaccggaatttgctgcactgacaaaagaattaaatgcctgcagggaacaacttctagaaaaggaagaagaaatctctgaacttaaagctgaaagaaacaacacaagactattactggagcatttggagtgccttgtgtcacgacatgaaagatcactaagaatgacggtggtaaaacggcaagcccagtctccctcaggagtatccagtgaagttgaagttctcaaggcactgaaatctttgtttgagcaccacaaggccttggatgaaaaggtaagggagcgactgagggtttctttagaaagagtctctgcactggaagaagaactagctgctgctaatcaggagattgttgccttgcgtgaacaaaatgttcatatacaaagaaaaatggcatcaagcgagggatccacagagtcagaacatcttgaagggatggaacctggacagaaagtccatgagaagcgtttgtccaatggttctatagactcaaccgatgaaactagtcaaatagttgaactacaagaattgcttgaaaagcaaaactatgaaatggcccagatgaaagaacgtttagcagccctttcttcccgagtgggagaggtggaacaggaagcagagacagcaagaaaggatctcattaaaacagaagaaatgaacaccaagtatcaaagggacattagggaggccatggcacaaaaggaagatatggaagaaagaattacaacccttgaaaagcgttacctcagtgctcagagagaatctacctccatacatgacatgaatgataaactagaaaatgagttagcaaataaagaagctatcctgcggcagatggaagagaaaaacagacagttacaagaacgtcttgagctagctgaacaaaagttgcagcagaccatgagaaaggctgaaaccttgcctgaagtagaggctgaactggctcagagaattgcagccctaaccaaggctgaagagagacatggaaatattgaagaacgtatgagacatttagagggtcaacttgaagagaagaatcaagaacttcaaagagctaggcaaagagagaaaatgaatgaggagcataacaagagattatcggatacggttgatagacttctgactgaatccaatgaacgcctacaactacacttaaaggaaagaatggctgctctagaagaaaagaatgttttaattcaagaatcagaaactttcagaaagaatcttgaagaatctttacatgataaggaaagattagcagaagaaattgaaaagctgagatctgaacttgaccaattgaaaatgagaactggctctttaattgaacccacaataccaagaactcatctagacacctcagctgagttgcggtactcagtgggatccctagtggacagccagtctgattacagaacaactaaagtaataagaagaccaaggagaggccgcatgggtgtgcgaagagatgagccaaaggtgaaatctcttggggatcacgagtggaatagaactcaacagattggagtactaagcagccacccttttgaaagtgacactgaaatgtctgatattgatgatgatgacagagaaacaatttttagctcaatggatcttctctctccaagtggtcattccgatgcccagacgctagccatgatgcttcaggaacaattggatgccatcaacaaagaaatcaggctaattcaggaagaaaaagaatctacagagttgcgtgctgaagaaattgaaaatagagtggctagtgtgagcctcgaaggcctgaatttggcaagggtccacccaggtacctccattactgcctctgttacagcttcatcgctggccagttcatctccccccagtggacactcaactccaaagctcacccctcgaagccctgccagggaaatggatcggatgggagtcatgacactgccaagtgatctgaggaaacatcggagaaagattgcagttgtggaagaagatggtcgagaggacaaagcaacaattaaatgtgaaacttctcctcctcctacccctagagccctcagaatgactcacactctcccttcttcctaccacaatgatgctcgaagtagtttatctgtctctcttgagccagaaagcctcgggcttggtagtgccaacagcagccaagactctcttcacaaagcccccaagaagaaaggaatcaagtcttcaataggacgtttgtttggtaaaaaagaaaaagctcgacttgggcagctccgaggctttatggagactgaagctgcagctcaggagtccctggggttaggcaaactcggaactcaagctgagaaggatcgaagactaaagaaaaagcatgaacttcttgaagaagctcggagaaagggattaccttttgcccagtgggatgggccaactgtggtcgcatggctagagctttggttgggaatgcctgcgtggtacgtggcagcctgccgagccaacgtgaagagtggtgccatcatgtctgctttatctgacactgagatccagagagaaattggaatcagcaatccactgcatcgcttaaaacttcgattagcaatccaggagatggtttccctaacaagtccttcagctcctccaacatctcgaactccttcaggcaacgtttgggtgactcatgaagaaatggaaaatcttgcagctccagcaaaaacgaaagaatctgaggaaggaagctgggcccagtgtccggtttttctacagaccctggcttatggagatatgaatcatgagtggattggaaatgaatggcttcccagcttggggttacctcagtacagaagttactttatggaatgcttggtagatgcaagaatgttagatcacctaacaaaaaaagatctccgtgtccatttaaaaatggtggatagtttccatcgaacaagtttacaatatggaattatgtgcttaaagaggttgaattatgacagaaaagaactagaaagaagacgggaagcaagccaacatgaaataaaagacgtgttggtgtggagcaatgaccgagttattcgctggatacaagcaattggacttcgagaatatgcaaataatatacttgagagcggtgtgcatggctcacttatagccctggatgaaaactttgactacagcagcttagctttattattacagattccaacacagaacacccaggcaaggcagattcttgaaagagaatacaataacctcttggccctgggaactgaaaggcgactggatgaaagtgatgacaagaacttcagacgtggatcaacctggagaaggcagtttcctcctcgtgaagtacatggaatcagcatgatgcctgggtcctcagaaacattaccagctggatttaggttaaccacaacctctgggcagtcaagaaaaatgacaacagatgatggcgtcttttcagtctactctacctaaagtgcactaccatctaagaagacgagcagtgaaaacctttgtgaaaactgaattctaaggaaataatgacgtcatgacttattaaaagctgaaaaatgtgatttttggggggagtcagatattacatttgattagtttactacaaattgtaataaaatgcttaagtcatttgaataataaacatcatctacatcataaactctgtacaacagatgcttttatgaaatgaagccagttgtttttcatgttttattgtaatatactaggcatttatgtattaccgtgcatttctttttaaatgtgtaagtcttatgtaaatggatataaatatgattttttaaaaaataaaatatatggttcatggagtctcgagtgcaaacatttgacaattccaagtactgtttgtattttaccattccaccatttttacagtttttggattgttaatagtcaaatcaatatgtttccttgaagcatgtttcatgcttcaacgtgtttctccttcaagtctgtcaatacttaaagctgaacaacctgcctctgatcatgtaaaaaagaatgatttaacctggaaccggagccaaaaatagagctttaaaggcaatcagggatgtcctatatctttagaaatagcactgtgatggcttgatctccttttcaatacaaaacaaagccaagctgtttacaagggtcaaaagcaattatttaaaaatttatattaaaaaaccataatcttctcttgttacctgtggaccaagaaaaaaaaaaagataaaaaaacttctttactaagaaccacatgttcattcaaatatcttgaaatgccagccagtactggacagtgaatgtcaaccaccgcagagtctgaggctcatttccactagagaaaacgaaacccaagatacctttcccttttgtcaatgtaacagggcattagccagactcatgtctaatgttataagcttttagccgagatggccttgttgcgacttccctgaagtcagttttatcagaggaaataaatgaaagacagaatgattaacatatatagtgtataaaagtatagaagagtaatctcttccctgtggctttatttggtggtgttactgttgtttattctttgtttatatgggagattcaaagtaaagcctatttaataataccatttatctaactgctgattttctgctgcttgatcttattaagcgcaagacctgtcattagtaatttcttttctgtattttaatttgctatgtttgcacgtacattacatttgttttgatgtctatttttatttaacagattcagtcaaaaggtaatgataacagaaaccctttccattgtcaataaaaaaaataataattccagttctctgtttaagctttgttttctagtcacataaggctcgacaatttacttaaactatcaggaaatgtgttctttgggtgacccaaatatttagcttcaaaattgagtctgccacaagagggagatctaaacttgcttatgggagtgatcttaaaatttttttctaaaaatgtggcctgagtaggaacaatgagaagtagctttctaagctcatctaaacatgggcatcttgattcatagaaatgaaatagaatataggaactacgacattataatgccataactagatt

SEQ ID NO: 373 - DNA, 2791 bp, Artificial Sequence
  OLFM1
agagccggacggcgcttcccggtggcggcggaggagcccggagggacgcagccgggcaaggcagggcgcagggcgggcggcgcgaggcgcagggcgcggcgggcagaggccacctggccaccttccctggcgcccggggaaggcgcggcgatggccggggcgcgcggggcggcggcggcggcgggcgggcggcggcgggccgagggggcgcggggacacagccaggcgcccctgcccgccgcggtgcccgccgcctgaaggccgcctgggcgcgggagccggtgccagctcggagcgggcgctggaggcagctcgaggcgcgatgtcggtgccgctgctcaagatcggggtcgtgctgagcaccatggccatgatcactaactggatgtcccagacgctgccctcgctggtgggcctcaacaccaccaagctctcggcggccggcggcgggacgctggaccgcagcaccggcgtgctgcccaccaaccctgaggagagctggcaggtgtacagctctgcccaggacagcgagggcaggtgtatctgcacagtggtcgctccacagcagaccatgtgttcacgggatgcccgcacaaaacagctgaggcagctactggagaaggtgcagaacatgtctcaatccatagaggtcttggacaggcggacccagagagacttgcagtacgtggagaagatggagaaccaaatgaaaggactggagtccaagttcaaacaggtggaggagagtcataagcaacacctggccaggcagtttaaggcgataaaagcgaaaatggatgaacttaggcctttgatacctgtgttggaagagtacaaggccgatgccaaattggtattgcagtttaaagaggaggtccagaatctgacgtcagtgcttaacgagctgcaagaggaaattggcgcctatgactacgatgaacttcagagcagagtgtccaatcttgaagaaaggctccgtgcatgcatgcaaaaactagcttgcgggaagttgacgggcatcagtgaccccgtgactgtcaagacctccggctcgaggttcggatcctggatgacagaccctctcgcccctgaaggcgataaccgggtgtggtacatggacggctatcacaacaaccgcttcgtacgtgagtacaagtccatggttgacttcatgaacacggacaatttcacctcccaccgtctcccccacccctggtcgggcacggggcaggtggtctacaacggttctatctacttcaacaagttccagagccacatcatcatcaggtttgacctgaagacagagaccatcctcaagacccgcagcctggactatgccggttacaacaacatgtaccactacgcctggggtggccactcggacatcgacctcatggtggacgagagcgggctgtgggccgtgtacgccaccaaccagaacgctggcaacatcgtggtcagtaggctggaccccgtgtccctgcagaccctgcagacctggaacacgagctaccccaagcgcagcgccggggaggccttcatcatctgcggcacgctgtacgtcaccaacggctactcagggggtaccaaggtccactatgcataccagaccaatgcctccacctatgaatacatcgacatcccattccagaacaaatactcccacatctccatgctggactacaaccccaaggaccgggccctgtatgcctggaacaacggccaccagatcctctacaacgtgaccctcttccacgtcatccgctccgacgagttgtagctccctcctcctggaagccaagggcccacgtcctcaccacaaagggactcctgtgaaactgctgccaaaaagataccaataacactaacaataccgatcttgaaaaatcatcagcagtgcggattctgacatcgagggatggcattacctccgtgtttctccctttcgagccggcgggccacagacgtcggaagaaactcccgtatttgcagctggaactgcagcccacggcgccccggttttcctccccgccctgtccctctctggtcaaacaacatactaaagaggcgaggcaatgactgttggccagttctcaccggggaaaaacccactgttaggatggcatgaacatttccttagatcgtggtcagctccgaggaatgtggcgtccaggctctttgagagccatgggctgcacccggccgtaggctagtgtaactcgcatcccattgcagtgccgtttcttgactgtgttgctgtctcttagattaaccgtgctgaggctccacatagctcctggacctgtgtctagtacatactgaagcgatggtcagagtgtgtagagtgaagttgctgtgcccacattgtttgaactcgcgtaccccgtagatacattgtgcaacgttcttctgttattcccttgaggtggtaacttcgtatgttcagtttatgcgatgattgttgtaaatgcaatgccgtagtttggattaataagtggatggtttttgtttctaaaaagaaaaaaaaaatcagtgttcacccttatagagacatagtcaagttcatgttgataataatcaaaggaattactctcttcttgttaaattagctaaatcatgtaaccgcagataggaagggctcgcctggggaaactctggtttccgatgggacaggaaagtcatacgggcaacagtatgcggaaagtacgttttttaagtaaaaaacaaaggcaaactttgtactatccagttatctaaggaacaataaaaacattaggagatcttttaaaaa

SEQ ID NO: 374 - DNA, 2406 bp, Artificial Sequence
  STMN4
gagcagtggtgctgatgttgagagaagcccagggtaccactaattgagggagtgaggaagagagcagctcgcttctaactggactgcacgttggtgacagcgtcccaagctggtgacagacccactctgtaactttcagctagattcagccaccagatcccagaaacatgacccttgctgcctacaaagagaagatgaaggagctcccgctggtgtccttgttctgctcctgcttcctggccgatcccctgaataagtcgtcctacaaatatgaaggctggtgtgggagacagtgtaggaggaaggatgaaagccagcggaaagacagtgctgactggagagaaagaagagctcaggcagacacggtggacctgaattggtgcgtcatttccgacatggaagtcatcgagctgaacaaatgcacctcgggccaatcctttgaagtcatcctgaagccaccctcctttgatggggttcccgagttcaacgcctccctgccaaggcggcgagacccatccctggaagagatccagaagaaactagaagcggctgaggagcgaaggaagtaccaggaagcggagctcctgaaacacctagcagagaaacgggaacatgagagagaggtgatccaaaaggccattgaggaaaacaacaacttcatcaagatggctaaggaaaaactggcccagaagatggaatccaacaaggagaacagggaggcccacctcgccgccatgttggaacggctgcaagagaaggaaccgcctgctgcgcggtgactcccgggacctgatcggtggcctcgtcccatggacaagcacgccgaggaggtgcggaaaaacaaggagctgaaggaagaggcctccaggtaaagcctagaggccaaagaactttccaggtcagccggacagctccagcagctccacgttccaggcagcctcgcccgccggctgcgctcccagcactggggtttggggggaggggggtggccaaggggcgtttcctctgcttttggtgtttgtacatgttaagaattgaccagtgaagccatcctatttgtttccggggaacaatgacggggtgggagaggggagaggagagagtttgggaaagggagatggagaagaactcaaggacattgcaaccctgcccggcgcagatctgattttcacatctctacctggacattgagcctccaggcaccatgttgaggagagatgaaaaccagggcggtagaacttcagggtgaaggacagagtcctgggtggggcagcggctgcagggcgcaccagagaacccagccagaggggttgtgagtaccagtggtgttgcttccaccctgcagcaggtgggatgaggtctgtgtgtgtgtgtgaaccatcattttttgatcatcatgaccaatgaaacattgactccaagtgtccagttctttatttcccaaatgtgtcctttgggtaattgttaaaaagttctcgaaacctggctttcatccatctgatggcagatgcccctttgcttccttaattctgccattcaagcatctggagcctgggtgaggtgggttgaatcaggccagcctttggcataattgaaaggttttctcttctgttttttaaaatcccctctgtgggctaatctttattggatagcatgcactaaattgatgagaaaagaaactcaatcttcctttcaatgaactgacatcctaatatggtccccaagatgcactgtaagaaggaatttgtcttagtcacaaccgttcagactgctgtaacaaaataccttagactaagtaattgataacagaaattgattgctcacagttttggaggctgggaagtccaatatcaaggtgccagcagattcagtgtctggtgagggcttgccatctgcttcaaagatgatgcctttttgctgcatcctcacatggcagaagggaagggcaaaagggcttccttgagccttttctttaaggcactaatcccattcatgaaggtggagtcctcatgatctcacctcttaaggccctatctcttaattctgtagtgtcgggattaggattcaacctgtatattgggggagacagcaacattcacaccatagcagaagtcctccatgctttgggggtttgagattctaggtagattagaaaatacgagcaaggaaataaagtgtttgctagtagaaggcaaaggaggcatccagacccagcagtcttggtctccaggacactgaaccatggctggaaaagaagctctcctcctcccttcccctgcaaacatgagtgcaggggctgcctgtgttaaccgggtcccaggacctcttcccactctgctctgcacactgtgtagttttttacagctttgcaaataaaccctttggtatagcctttaaaaaaaaaaa

SEQ ID NO: 375 - DNA, 727 bp, Artificial Sequence
  PRM2
agaccagaccaacagtaacaccaagggcaggtgggcaggcctccgccctcctcccctactccagggcccactgcagcctcagcccaggagccaccagatctcccaacaccatggtccgataccgcgtgaggagcctgagcgaacgctcgcacgaggtgtacaggcagcagttgcatgggcaagagcaaggacaccacggccaagaggagcaagggctgagcccggagcacgtcgaggtctacgagaggacccatggccagtctcactataggcgcagacactgctctcgaaggaggctgcaccggatccacaggcggcagcatcgctcctgcagaaggcgcaaaagacgctcctgcaggcaccggaggaggcatcgcagagagtccctaggtgaccccctcaaccagaactttctttcccaaaaggctgcagaaccaggaagagaacatgcagaaggcactaagcttcctgggcccctcacccccagctggaaattaagaaaaagtcgcccgaaacaccaagtgaggccatagcaattcccctacatcaaatgctcaagcccccagctggaagttaagagaaagtcacctgcccaagaaacaccgagtgaggccatagcaactcccctacatcaaatgctcaagccctgagttgccgccgagaagcccacaagatctgagtgaaatgagcaaaagtcacctgcccaataaagcttgacaagacactc

SEQ ID NO: 376 - DNA, 2969 bp, Artificial Sequence
  KLF5
actttagctcagacctttcttttaaccttgcctatcatgtttcgagtcagaatttaaatactgtgcagtttaagctacaatacgcttggcctataacttggttccaggcatttatatttatgtcacttttgtctacttattatactaacaaggtggaaaaagcaatcccagtctctccaaaagacaagatgtgaaatggagaagtatctgacacctcagcttcctccagttcctataattccagagcataaaaagtatagacgagacagtgcctcagtcgtagaccagttcttcactgacactgaagggttaccttacagtatcaacatgaacgtcttcctccctgacatcactcacctgagaactggcctctacaaatcccagagaccgtgcgtaacacacatcaagacagaacctgttgccattttcagccaccagagtgaaacgactgcccctcctccggccccgacccaggccctccctgagttcaccagtatattcagctcacaccagaccgcagctccagaggtgaacaatattttcatcaaacaagaacttcctacaccagatcttcatctttctgtccctacccagcagggccacctgtaccagctactgaatacaccggatctagatatgcccagttctacaaatcagacagcagcaatggacactcttaatgtttctatgtcagctgccatggcaggccttaacacacacacctctgctgttccgcagactgcagtgaaacaattccagggcatgcccccttgcacatacacaatgccaagtcagtttcttccacaacaggccacttactttcccccgtcaccaccaagctcagagcctggaagtccagatagacaagcagagatgctccagaatttaaccccacctccatcctatgctgctacaattgcttctaaactggcaattcacaatccaaatttacccaccaccctgccagttaactcacaaaacatccaacctgtcagatacaatagaaggagtaaccccgatttggagaaacgacgcatccactactgcgattaccctggttgcacaaaagtttataccaagtcttctcatttaaaagctcacctgaggactcacactggtgaaaagccatacaagtgtacctgggaaggctgcgactggaggttcgcgcgatcggatgagctgacccgccactaccggaagcacacaggcgccaagcccttccagtgcggggtgtgcaaccgcagcttctcgcgctctgaccacctggccctgcatatgaagaggcaccagaactgagcactgcccgtgtgacccgttccaggtcccctgggctccctcaaatgacagacctaactattcctgtgtaaaaacaacaaaaacaaacaaaagcaagaaaaccacaactaaaactggaaatgtatattttgtatatttgagaaaacagggaatacattgtattaataccaaagtgtttggtcattttaagaatctggaatgcttgctgtaatgtatatggctttactcaagcagatctcatctcatgacaggcagccacgtctcaacatgggtaaggggtgggggtggaggggagtgtgtgcagcgtttttacctaggcaccatcatttaatgtgacagtgttcagtaaacaaatcagttggcaggcaccagaagaagaatggattgtatgtcaagattttacttggcattgagtagtttttttcaatagtaggtaattccttagagatacagtatacctggcaattcacaaatagccattgaacaaatgtgtgggtttttaaaaattatatacatatatgagttgcctatatttgctattcaaaattttgtaaatatgcaaatcagctttataggtttattacaagttttttaggattcttttggggaagagtcataattcttttgaaaataaccatgaatacacttacagttaggatttgtggtaaggtacctctcaacattaccaaaatcatttctttagagggaaggaataatcattcaaatgaactttaaaaaagcaaatttcatgcactgattaaaataggattattttaaatacaaaaggcattttatatgaattataaactgaagagcttaaagatagttacaaaatacaaaagttcaacctcttacaataagctaaacgcaatgtcatttttaaaaagaaggacttagggtgtcgttttcacatatgacaatgttgcatttatgatgcagtttcaagtaccaaaacgttgaattgatgatgcagttttcatatatcgagatgttcgctcgtgcagtactgttggttaaatgacaatttatgtggattttgcatgtaatacacagtgagacacagtaattttatctaaattacagtgcagtttagttaatctattaatactgactcagtgtctgcctttaaatataaatgatatgttgaaaacttaaggaagcaaatgctacatatatgcaatataaaatagtaatgtgatgctgatgctgttaaccaaagggcagaataaataagcaaaatgccaaaaggggtcttaattgaaatgaaaatttaattttgtttttaaaatattgtttatctttatttattttgtggtaatatagtaagtttttttagaagacaattttcataacttgataaattatagttttgtttgttagaaaagttgctcttaaaagatgtaaatagatgacaaacgatgtaaataattttgtaagaggcttcaaaatgtttatacgtggaaacacacctacatgaaaagcagaaatcggttgctgttttgcttctttttccctcttatttttgtattgtggtcatttcctatgcaaataatggagcaaacagctgtatagttgtagaattttttgagagaatgagatgtttatatattaacgacaattttttttttggaaaataaaaagtgcctaaaagatgtaaaaaaaaaaaaaaaaaa

SEQ ID NO: 377 - DNA, 5289 bp, Artificial Sequence
  CTNND2
gttccttttagccgtggtgcagggagggaggagggaggtgggtaggatgccaggaaccgcctgctccacagcctggggaaggagggaagagtaacccttcatctttgggactagtcgtcttgtttgcctagactacagttttcaagtatttaaggaccatttatttcaaaaggaattacagtttgaaaggctgacccgagagctggaggctgaacggcagatcgtagccagccagctggagcgatgcaagctcggatccgagactggcagcatgagcagcatgagttcagcagaagagcagtttcagtggcagtcacaagatggtcaaaaagatatcgaagatgagcttacaacaggtctcgagctggtggactcctgtattaggtcactacaggaatcaggaatacttgacccacaggattattctacaggtgaaaggcccagcctgctctcccagagtgcacttcagctcaattccaaacctgaagggtctttccagtatccggccagctaccatagcaaccagaccctggccctgggggaaaccaccccttcacagctcccggcccgaggcacacaagcccgagctacgggccagagcttcagccagggcacgaccagccgcgccggccacctggcggggcccgagcccgcgccgccgccgccgccgccgccgcgggagccgttcgcgcccagcctgggcagcgccttccacctgcccgacgcgccgcccgccgccgccgccgccgcgctctactactccagctccacgctgcccgcgccgccgcgcgggggctccccgctggccgcgccccagggcggttcgcccaccaagctgcagcgcggcggctcggcccccgagggcgccacctacgccgcgccgcgcggctcctcgcccaagcagtcgcccagccgcctggccaagtcctacagcaccagctcgcccatcaacatcgtcgtgtcctcggccggcctgtccccgatccgcgtgacctcgccccccaccgtgcagtccaccatctcctcctcgcccatccaccagctgagctccaccatcggcacgtacgccaccctgtcgcccaccaagcgcctggtccacgcgtccgagcagtacagcaagcactcgcaggagctgtatgccacggccaccctccagaggccgggcagcctggcagctggttcccgagcctcatacagcagccagcatgggcacctgggcccagagttgcgggccctgcagtccccagaacaccacatagatcccatctatgaagaccgcgtctatcagaagccccctatgaggagtctcagccagagccagggggaccctctgccgccagcacacaccggcacctaccgcacgagcacagccccatcttcccctggtgtcgactccgtccccttgcagcgcacaggcagccagcacggcccacagaatgccgccgcggccaccttccagagggccagctatgccgccggcccagcctccaattacgcggacccctaccgacagctgcagtattgtccctctgttgagtctccatacagcaaatccggccctgctctcccgcctgaaggcaccttggccaggtccccgtccattgatagcattcagaaagatcccagagaatttggatggagagacccggaactgccggaagtgattcagatgttgcagcaccagtttccctcggtccagtctaacgcggcagcctacttgcaacacctctgttttggagacaacaaaattaaagccgagataaggagacaaggaggcatccagctcctggtggacctgttggatcatcggatgaccgaagtccaccgtagtgcctgtggagctctgagaaacctggtgtatgggaaggccaacgatgataacaaaattgccctgaaaaactgtggtggcatcccagcactggtgaggttactccgcaagacgactgacctggagatccgggagctggtcacaggagtcctttggaacctctcctcatgcgatgcactcaaaatgccaatcatccaggatgccctagcagtactgaccaacgcggtgattatcccccactcaggctgggaaaattcgcctcttcaggatgatcggaaaatacagctgcattcatcacaggtgctgcgtaacgccaccgggtgcctaaggaatgttagttcggccggagaggaggcccgcagaaggatgagagagtgtgatgggcttacggatgccttgctgtacgtgatccagtctgcgctggggagcagtgagatcgatagcaagaccgttgaaaactgtgtgtgcattttaaggaacctctcgtaccggctggcggcagaaacgtctcagggacagcacatgggcacggacgagctggacgggctactctgtggcgaggccaatggcaaggatgctgagagctctgggtgctggggcaagaagaagaagaaaaagaaatcccaagatcagtgggatggagtaggacctcttccagactgtgctgaaccaccaaaagggatccagatgctgtggcacccatcaatagtcaaaccctacctcacactgctctctgagtgctcaaatccagacacgctggaaggggcggcaggcgccctgcagaacttggctgcagggagctggaagtggtcagtatatatccgagccgctgtccgaaaagagaaaggcctgcccatcctcgtggagctgctccgaatagacaatgaccgtgtggtgtgcgcggtggccactgcgctgcggaacatggccttggacgtcagaaataaggagctcatcggcaaatacgccatgcgagacctagtccacaggcttccaggagggaacaacagcaacaacactgcaagcaaggccatgtcggatgacacagtgacagctgtctgctgcacactgcacgaagtgattaccaagaacatggagaacgccaaggccttacgggatgccggtggcatcgagaagttggtcggcatctccaaaagcaaaggagataaacactctccaaaagtggtcaaggctgcatctcaggtcctcaacagcatgtggcagtaccgagatctgaggagtctctacaaaaaggatggatggtcacaataccactttgtagcctcgtcttcaaccatcgagagggaccggcaaaggccctactcctcctcccgcacgccctccatctcccctgtgcgcgtgtctcccaacaaccgctcagcaagtgccccagcttcacctcgggaaatgatcagcctcaaagaaaggaaaacagactacgagtgcaccggcagcaacgccacctaccacggagctaaaggcgaacacacttccaggaaagatgccatgacagctcaaaacactggaatttcaactttgtataggaattcttatggtgcgcccgctgaagacatcaaacacaaccaggtttcagcacagccagtcccacaggagcccagcagaaaagattacgagacctaccagccatttcagaattccacaagaaattacgatgagtccttcttcgaggaccaggtccaccatcgccctcccgccagcgagtacaccatgcacctgggtctcaagtccaccggcaactacgttgacttctactcagctgcccgtccctacagtgaactgaactatgaaacgagccactacccggcctcccccgactcctgggtgtgaggagcagggcacaggcgctccgggaacagtgcatgtgcatgcataccacaagacatttctttctgttttgtttttttctcctgcaaatttagtttgttaaagcctgttccataggaaggctgtgataaccagtaaggaaatattaagagctattttagaaagctaaatgaatcgcaagttaacttggaaatcagtagaaagctaaagtgatcctaaatatgacagtgggcagcacctttctagcgtgagctgtagagtaacgagaagtgctttatactgaacgtggttgatgggaggagagacgaggcattcgggccggtggggcgtaagggttatcgttaagcacaagacacagaatagtttacacactgtgtgggggacggcttctcacgctttgtttactctcttcatccgttgtgactctaggcttcaggttgcattggggttcctctgtacagcaagatgtttcttgccttttgttaatgcattgttgtaaagtatttgatgtacattacagattaaagaagaaaagcgcgttgtgtatattacaccaatgccgccgtgtttcctcatctatggttctaaatattgcttcaatttcaaacttttgaaagatgtatggatttccagtttttctttactttctcccagtatgttttaacaaaaaaaaaaaaaagcaggaaaaaaggaatatttagcagtattgttcgttctgatatgtgaatttgtttgtgacaactaaacaaggcattcagcagtttctgacaattaacatacatcattccacactccttgtcaacaaagtgctttttcactgcctaaaattttagatgtagatatttgaaatagattttttcatttataccagttttctttatgatgatacagtgttaaaagaaaataaattacaattgatctgtcatccatatttgctaagaatgtctatttccaagaacctatatcttacaaaatacacattcttgcttgtgtgtctgtgtgtgtgggtgtatgtatgtccacgtactagaaaaattacctgtgtgagattttattttgacagaagctatttcatttgctgttcatcttgtacaaactttgtttttggttttttagtataaatgtacatcagtttgttccttttgtactgtatctattcttctgaccatctagtgactcaggatattaggccagttgaagtggagttataggattttcacacattcacgcatacttggatatcaaccctctctacaggtccgtttccttacacattttatcccctcagaacacgataaaccatggccaattcagtttcactttggggccaattacttgaagtatccacagaaaatgtaaactgctcgccttattcccccaaactttttgttcatgtggcagggagcagtacacaactatggaatagattattaaaactgaacttgaagctaacgttagaatagtggttaacagagctaagaaataaggctaaccatcgaaaagaacatgggccgcgggtaaactagctttgctctttagatgcaagtggctgaggccaataggtgcctagtaaatgttaactgttcttggaaaaaataaaaacatcagtaacaaaa

SEQ ID NO: 378 - DNA, 3472 bp, Artificial Sequence
  GMIP
cgtggcctccgctgggcagggcgacgcggaaccgaggcggcggcggcggctgcggcggcaggaaatcggggctcggccccgccggcgcgcgaccccatccccatcccggtccctgcagagcgatccccgggcccagatatggacgcagcagagccgggactccccccaggtcctgagggcaggaagaggtacagtgacatcttccggagcctggacaacctcgaaatctcactggggaacgtgacccttgagatgctggctggagaccctctactctcagaagacccagaacctgacaagacccctacagccactgttaccaacgaagccagctgttggagcggcccctccccagagggtcctgtacccctcacaggggaggaactggacttgcggctcattcggacaaaggggggtgtggacgcagccctggaatatgccaagacctggagccgctatgccaaggaactgcttgcctggactgaaaagagagccagctatgagctggagtttgctaagagcaccatgaagatcgctgaagctggcaaggtgtccattcaacagcagagccacatgcctctgcagtacatctacaccctgtttctggagcacgatctcagcctgggaaccctggccatggagacagtggcccagcagaaaagagactactaccagcccctcgccgccaaacggactgagattgagaagtggcggaaggagttcaaggagcagtggatgaaggagcagaagcggatgaatgaggcggtgcaggcactgcggcgcgcccagctgcagtatgtgcaacgcagcgaggacctgcgggcacgctcccaggggtcccctgaggactcggccccccaggcctcgccgggacctagcaagcagcaggagcggcggcggcgctcgcgagaggaggcccaggccaaggcgcaggaggccgaggcgctgtaccaggcctgtgtccgcgaggccaacgcgcggcagcaggacctggagatcgccaagcagcgaatcgtgtcgcacgtgcgcaagctggtgtttcagggggatgaagtgctgaggcgggtgacgctgagtctcttcgggctgcggggggcgcaggcagagcgtggcccccgcgccttcgccgccctggccgagtgctgtgcgccctttgagccgggccagcgctaccaggagtttgtacgggcgctgcggcccgaggccccgccgcccccgccgcccgccttctccttccaggagttccttccctccttgaacagctcccctctggacatcagaaagaagctctctgggcctcttcctccaaggctggatgagaattcagctgagccaggcccttgggaggatccgggcacaggctggcgctggcaaggccccactccgggcagcgatgtggacagcgtgggtggcggcagcgagtctcggtccctggactcacccacttccagcccagacctgggagacgggctggagaatgggctgggcagccccttcgggaagtggacactgtccagcgcggctcagacccaccagctgcggcgactgcggggcccagccaagtgccgcgagtgcgaagccttcatggtcagcgggacggagtgtgaggagtgctttctgacctgccacaagcgctgcctggagactctcctgatcctctgtggacacaggcggctcccagcccggacacccctttttggggttgacttcctgcagctacccagggacttcccggaggaggtaccctttgtggtcacgaagtgcacggctgagatagaacaccgtgccctggatgtgcagggcatttaccgggtcagcgggtcccgggtccgtgtggagcggctgtgccaggctttcgagaatggccgagcgttggtggagctgtcggggaactcgcctcatgacgtctcgagtgtcctcaagcgatttcttcaggagctcaccgagcccgtgatccccttccacctctacgacgccttcatctctctggctaagaccttgcatgcagaccctggggacgaccctgggacccccagccccagccctgaggttatccgctcgctgaagaccctcttggtacagctgcctgactctaactacaacaccctgcggcacctggtggcccatctgttcagggtggctgcacgatttatggaaaacaagatgtctgccaacaacctgggcattgtgtttgggccgacactgctgcggccgccggacggcccgcgggcagccagcgccatccctgtcacctgcctgctggactctgggcatcaggcccagcttgtggagttcctcatcgtgcactacgagcagatctttgggatggatgagctcccccaggccactgagcccccgccccaagactccagcccagcccctgggcccctcacaaccagctcccaaccgccacccccgcaccttgacccagactcccagcccccagtcctagcctcagaccccggcccagacccccagcaccacagtaccctggagcagcatcccacggccacacctaccgagattccaactccacagagtgaccagagagaggacgtggctgaagacaccaaagatgggggaggggaagtgtccagccaaggcccagaggactcactcctggggacacagtctcgtggccacttcagccgccagccagtgaagtatccccggggcggtgtgaggcctgtaacccaccagctgtccagtctggccctggtggcttccaagctgtgcgaggagacccccatcacatcagtgcccagagggagtttgcgggggcgggggcccagccctgcagctgcctcccctgagggcagccccctgcgccgcaccccgctgcccaagcattttgagattacccaggagacagcccggctactctcgaaattggacagcgaggctgtgcccagggccacctgctgcccggacgtccagcctgaggaagccgaggaccatctctgaccaccctggcaccttaaataaggaagaggcccagattgtgaagacggacccatatatccctacctcccaccacctagtggccaaacaccccgccaggagttcaatgctgggagaggtccagagggttcctataaggaaaaactatttaatacatgacctaggggaggcctaaaacccttttggggataatgtcccagagtccccccactagacacaggtcactgccaagcatcagggccactcgggctcagaggtcactcagggtcaatactcagggtcagtgcaggttatgagatccttggggtccaccctagtctctgacacctgggacaggggtgcttttgctactttggttgtggtcactcccccacacctgcctgcctccttcacggactcgaagtgaccttcctggaggaggtgggcagctcagactccacatgctggtggtgcctgaggtctgatggcctctaataaactgtgtcctatatgcaaaaaaaaaaaaaaaaaa

SEQ ID NO: 379 - DNA, 5879 bp, Artificial Sequence
  SMARCA2
tcagaagaaagccccgagatcacagagacccggcgagatcacagagacccggcctgaaggaacgtggaaagaccaatgtacctgttttgaccggttgcctggagcaagaagttccagttggggagaattttcagaagataaagtcggagattgtggaaagacttgacttgcagcattactctactgactggcagagacaggagaggtagatgtccacgcccacagaccctggtgcgatgccccacccagggccttcgccggggcctgggccttcccctgggccaattcttgggcctagtccaggaccaggaccatccccaggttccgtccacagcatgatggggccaagtcctggacctccaagtgtctcccatcctatgccgacgatggggtccacagacttcccacaggaaggcatgcatcaaatgcataagcccatcgatggtatacatgacaaggggattgtagaagacatccattgtggatccatgaagggcactggtatgcgaccacctcacccaggcatgggccctccccagagtccaatggatcaacacagccaaggttatatgtcaccacacccatctccattaggagccccagagcacgtctccagccctatgtctggaggaggcccaactccacctcagatgccaccaagccagccgggggccctcatcccaggtgatccgcaggccatgagccagcccaacagaggtccctcacctttcagtcctgtccagctgcatcagcttcgagctcagattttagcttataaaatgctggcccgaggccagcccctccccgaaacgctgcagcttgcagtccaggggaaaaggacgttgcctggcttgcagcaacaacagcagcagcaacagcagcagcagcagcagcagcagcagcagcagcagcagcaacagcagccgcagcagcagccgccgcaaccacagacgcagcaacaacagcagccggcccttgttaactacaacagaccatctggcccggggccggagctgagcggcccgagcaccccgcagaagctgccggtgcccgcgcccggcggccggccctcgcccgcgccccccgcagccgcgcagccgcccgcggccgcagtgcccgggccctcagtgccgcagccggccccggggcagccctcgcccgtcctccagctgcagcagaagcagagccgcatcagccccatccagaaaccgcaaggcctggaccccgtggaaattctgcaagagcgggaatacagacttcaggcccgcatagctcataggatacaagaactggaaaatctgcctggctctttgccaccagatttaagaaccaaagcaaccgtggaactaaaagcacttcggttactcaatttccagcgtcagctgagacaggaggtggtggcctgcatgcgcagggacacgaccctggagacggctctcaactccaaagcatacaaacggagcaagcgccagactctgagagaagctcgcatgaccgagaagctggagaagcagcagaagattgagcaggagaggaaacgccgtcagaaacaccaggaatacctgaacagtattttgcaacatgcaaaagattttaaggaatatcatcggtctgtggccggaaagatccagaagctctccaaagcagtggcaacttggcatgccaacactgaaagagagcagaagaaggagacagagcggattgaaaaggagagaatgcggcgactgatggctgaagatgaggagggttatagaaaactgattgatcaaaagaaagacaggcgtttagcttaccttttgcagcagaccgatgagtatgtagccaatctgaccaatctggtttgggagcacaagcaagcccaggcagccaaagagaagaagaagaggaggaggaggaagaagaaggctgaggagaatgcagagggtggggagtctgccctgggaccggatggagagcccatagatgagagcagccagatgagtgacctccctgtcaaagtgactcacacagaaaccggcaaggttctgttcggaccagaagcacccaaagcaagtcagctggacgcctggctggaaatgaatcctggttatgaagttgcccctagatctgacagtgaagagagtgattctgattatgaggaagaggatgaggaagaagagtccagtaggcaggaaaccgaagagaaaatactcctggatccaaatagcgaagaagtttctgagaaggatgctaagcagatcattgagacagctaagcaagacgtggatgatgaatacagcatgcagtacagtgccaggggctcccagtcctactacaccgtggctcatgccatctcggagagggtggagaaacagtctgccctcctaattaatgggaccctaaagcattaccagctccagggcctggaatggatggtttccctgtataataacaacttgaacggaatcttagccgatgaaatggggcttggaaagaccatacagaccattgcactcatcacttatctgatggagcacaaaagactcaatggcccctatctcatcattgttcccctttcgactctatctaactggacatatgaatttgacaaatgggctccttctgtggtgaagatttcttacaagggtactcctgccatgcgtcgctcccttgtcccccagctacggagtggcaaattcaatgtcctcttgactacttatgagtatattataaaagacaagcacattcttgcaaagattcggtggaaatacatgatagtggacgaaggccaccgaatgaagaatcaccactgcaagctgactcaggtcttgaacactcactatgtggcccccagaaggatcctcttgactgggaccccgctgcagaataagctccctgaactctgggccctcctcaacttcctcctcccaacaatttttaagagctgcagcacatttgaacaatggttcaatgctccatttgccatgactggtgaaagggtggacttaaatgaagaagaaactatattgatcatcaggcgtctacataaggtgttaagaccatttttactaaggagactgaagaaagaagttgaatcccagcttcccgaaaaagtggaatatgtgatcaagtgtgacatgtcagctctgcagaagattctgtatcgccatatgcaagccaaggggatccttctcacagatggttctgagaaagataagaaggggaaaggaggtgctaagacacttatgaacactattatgcagttgagaaaaatctgcaaccacccatatatgtttcagcacattgaggaatcctttgctgaacacctaggctattcaaatggggtcatcaatggggctgaactgtatcgggcctcagggaagtttgagctgcttgatcgtattctgccaaaattgagagcgactaatcaccgagtgctgcttttctgccagatgacatctctcatgaccatcatggaggattattttgcttttcggaacttcctttacctacgccttgatggcaccaccaagtctgaagatcgtgctgctttgctgaagaaattcaatgaacctggatcccagtatttcattttcttgctgagcacaagagctggtggcctgggcttaaatcttcaggcagctgatacagtggtcatctttgacagcgactggaatcctcatcaggatctgcaggcccaagaccgagctcaccgcatcgggcagcagaacgaggtccgggtactgaggctctgtaccgtgaacagcgtggaggaaaagatcctcgcggccgcaaaatacaagctgaacgtggatcagaaagtgatccaggcgggcatgtttgaccaaaagtcttcaagccacgagcggagggcattcctgcaggccatcttggagcatgaggaggaaaatgaggaagaagatgaagtaccggacgatgagactctgaaccaaatgattgctcgacgagaagaagaatttgacctttttatgcggatggacatggaccggcggagggaagatgcccggaacccgaaacggaagccccgtttaatggaggaggatgagctgccctcctggatcattaaggatgacgctgaagtagaaaggctcacctgtgaagaagaggaggagaaaatatttgggagggggtcccgccagcgccgtgacgtggactacagtgacgccctcacggagaagcagtggctaagggccatcgaagacggcaatttggaggaaatggaagaggaagtacggcttaagaagcgaaaaagacgaagaaatgtggataaagatcctgcaaaagaagatgtggaaaaagctaagaagagaagaggccgccctcccgctgagaaactgtcaccaaatccccccaaactgacaaagcagatgaacgctatcatcgatactgtgataaactacaaagataggtgtaacgtggagaaggtgcccagtaattctcagttggaaatagaaggaaacagttcagggcgacagctcagtgaagtcttcattcagttaccttcaaggaaagaattaccagaatactatgaattaattaggaagccagtggatttcaaaaaaataaaggaaaggattcgtaatcataagtaccggagcctaggcgacctggagaaggatgtcatgcttctctgtcacaacgctcagacgttcaacctggagggatcccagatctatgaagactccatcgtcttacagtcagtgtttaagagtgcccggcagaaaattgccaaagaggaagagagtgaggatgaaagcaatgaagaggaggaagaggaagatgaagaagagtcagagtccgaggcaaaatcagtcaaggtgaaaattaagctcaataaaaaagatgacaaaggccgggacaaagggaaaggcaagaaaaggccaaatcgaggaaaagccaaacctgtagtgagcgattttgacagcgatgaggagcaggatgaacgtgaacagtcagaaggaagtgggacggatgatgagtgatcagtatggacctttttccttggtagaactgaattccttcctcccctgtctcatttctacccagtgagttcatttgtcatataggcactgggttgtttctatatcatcatcgtctataaactagctttaggatagtgccagacaaacatatgatatcatggtgtaaaaaacacacacatacacaaatatttgtaacatattgtgaccaaatgggcctcaaagattcagattgaaacaaacaaaaagcttttgatggaaaatatgtgggtggatagtatatttctatgggtgggtctaatttggtaacggtttgattgtgcctggttttatcacctgttcagatgagaagatttttgtcttttgtagcactgataaccaggagaagccattaaaagccactggttattttatttttcatcaggcaattttcgaggtttttatttgttcggtattgtttttttacactgtggtacatataagcaactttaataggtgataaatgtacagtagttagatttcacctgcatatacatttttccattttatgctctatgatctgaacaaaagctttttgaattgtataagatttatgtctactgtaaacattgcttaatttttttgctcttgatttaaaaaaaagttttgttgaaagcgctattgaatattgcaatctatatagtgtattggatggcttcttttgtcaccctgatctcctatgttaccaatgtgtatcgtctccttctccctaaagtgtacttaatctttgctttctttgcacaatgtctttggttgcaagtcataagcctgaggcaaataaaattccagtaatttcgaagaatgtggtgttggtgctttcctaataaagaaataatttagcttgacaaaaaaaaaaaaaaa

SEQ ID NO: 380 - DNA, 964 bp, Artificial Sequence
  CRYAB
aggaggaggaggcaccaaacggcctgggtggatagaagggggacaaggaggcacacccaggccggcaaagagcagctcagtgagtactgggtatgtgtcacattgccaaatcccggatcacaagtctccatgaactgctggtgagctaggataataaaacccctgacatcaccattccagaagcttcacaagactgcatatataaggggctggctgtagctgcagctgaaggagctgaccagccagctgacccctcacactcacctagccaccatggacatcgccatccaccacccctggatccgccgccccttctttcctttccactcccccagccgcctctttgaccagttcttcggagagcacctgttggagtctgatcttttcccgacgtctacttccctgagtcccttctaccttcggccaccctccttcctgcgggcacccagctggtttgacactggactctcagagatgcgcctggagaaggacaggttctctgtcaacctggatgtgaagcacttctccccagaggaactcaaagttaaggtgttgggagatgtgattgaggtgcatggaaaacatgaagagcgccaggatgaacatggtttcatctccagggagttccacaggaaataccggatcccagctgatgtagaccctctcaccattacttcatccctgtcatctgatggggtcctcactgtgaatggaccaaggaaacaggtctctggccctgagcgcaccattcccatcacccgtgaagagaagcctgctgtcaccgcagcccccaagaaatagatgccctttcttgaattgcattttttaaaacaagaaagtttccccaccagtgaatgaaagtcttgtgactagtgctgaagcttattaatgctaagggcaggcccaaattatcaagctaataaaatatcattcagcaacagataaaaaaaaaaaaaaaaaaaaa

SEQ ID NO: 381 - DNA, 2489 bp, Artificial Sequence
  TPTE
ggggcggggccgggcggccgttcaaggcagggggcggggcgtctccgagcggcggggccaagggagggcacaacagctgctacctgaacagtttctgacccaacagttacccagcgccggactcgctgcgccccggcggctctagggacccccggcgcctacacttagctccgcgcccgagagaatgttggaccgacgacacaagacctcagacttgtgttattctagcagctgaacacaccccaggctcttctgaccggcagtggctctggaagcagtctggtgtatagagttatggattcactaccagattctactgtatgctcttgacaactatgaccacaatggcagcaagattaagaaaattgtgcattcaattgtatcatcctttgcatttggactatttggagttttcctggtcttactggatgtcactctcatccttgccgacctaattttcactgacagcaaactttatattcctttggagtatcgttctatttctctagctattgccttattttttctcatggatgttcttcttcgagtatttgtagaaaggagacagcagtatttttctgacttatttaacattttagatactgccattattgtgattcttctgctggttgatgtcgtttacattttttttgacattaagttgcttaggaatattcccagatggacacatttacttcgacttctacgacttattattctgttaagaatttttcatctgtttcatcaaaaaagacaacttgaaaagctgataagaaggcgggtttcagaaaacaaaaggcgatacacaagggatggatttgacctagacctcacttacgttacagaacgtattattgctatgtcatttccatcttctggaaggcagtctttctatagaaatccaatcaaggaagttgtgcggtttctagataagaaacaccgaaaccactatcgagtctacaatctatgcagtgaaagagcttacgatcctaagcacttccataatagggtcgttagaatcatgattgatgatcataatgtccccactctacatcagatggtggttttcaccaaggaagtaaatgagtggatggctcaagatcttgaaaacatcgtagcgattcactgtaaaggaggcacagatagaacaggaactatggtttgtgccttccttattgcctctgaaatatgttcaactgcaaaggaaagcctgtattattttggagaaaggcgaacagataaaacccacagcgaaaaatttcagggagtagaaactccttctcagaagagatatgttgcatattttgcacaagtgaaacatctctacaactggaatctccctccaagacggatactctttataaaacacttcattatttattcgattcctcgttatgtacgtgatctaaaaatccaaatagaaatggagaaaaaggttgtcttttccactatttcattaggaaaatgttcggtacttgataacattacaacagacaaaatattaattgatgtattcgacggtctacctctgtatgatgatgtgaaagtgcagtttttctattcgaatcttcctacatactatgacaattgctcattttacttctggttgcacacatcttttattgaaaataacaggctttatctaccaaaaaatgaattggataatctacataaacaaaaagcacggagaatttatccatcagattttgccgtggagatactttttggcgagaaaatgacttccagtgatgttgtagctggatccgattaagtatagctcccccttccccttctgggaaagaattatgttctttccaaccctgccacatgttcatatatcctaaatctatcctaaatgttccttgaagtatttatttatgtttatatatgtttatatatgttcttcataaatctattacatatatatagataaaatgtcagtgtctttcttcttttttgaaggtacatacttcacagtttccatcttgtatttacctaaatttggaacacagtatgcaggaacatcaggcatcattttgaagaactttgaaatagaactttcaaagcaaaaacttgagatattcaaaaattgtgattccccaacacccacttacttacatatttttggtcaagtatttattccctgctttggttcacatttgtaatttcagatttattagaaagctaatttatatatttttcttccccttcatttacaaactgtctgttaacagattggcaaccaagactaagttttaaatccagaagagagaaatgtttcacgcaagcagtcccccaactcccaacacacactccctttcattccgagcactaaataggtagcttacttgacaagcttcctttaattacacacagacatggaggttggggtaagaagatggtggtaaatatgaagataagtaatctttaataacttctgcttttgtataaaattgtaagtgaagtgaaaagaaatattcttagagtaa

SEQ ID NO: 382 - DNA, 2440 bp, Artificial Sequence
  CD24
agtttgcagcgtcaggcagcgggtctgcgcccagcgagcggctccccagctcctgggaagatgcggacccgggacgcccccgtgagctcactgcgcctggctgacacgaggcgctcacagaacaaagcaagggcttcggggagggcgcggccgcggggccgagcgcgcagatcgctccggacccggacaccgcctgcgaggagcgccgaccagccgggaagggttcgcgctaggcggcgcccgggtcccgtcggccagggtctcgccggctcgccgcgctccccaccttgcctgcgcccgcccggagccagcggttctccaagcacccagcatcctgctagacgcgccgcgcaccgacggaggggacatgggcagagcaatggtggccaggctcgggctggggctgctgctgctggcactgctcctacccacgcagatttattccagtgaaacaacaactggaacttcaagtaactcctcccagagtacttccaactctgggttggccccaaatccaactaatgccaccaccaaggcggctggtggtgccctgcagtcaacagccagtctcttcgtggtctcactctctcttctgcatctctactcttaagagactcaggccaagaaacgtcttctaaatttccccatcttctaaacccaatccaaatggcgtctggaagtccaatgtggcaaggaaaaacaggtcttcatcgaatctactaattccacaccttttattgacacagaaaatgttgagaatcccaaatttgattgatttgaagaacatgtgagaggtttgactagatgatggatgccaatattaaatctgctggagtttcatgtacaagatgaaggagaggcaacatccaaaatagttaagacatgatttccttgaatgtggcttgagaaatatggacacttaatactaccttgaaaataagaatagaaataaaggatgggattgtggaatggagattcagttttcatttggttcattaattctataaggccataaaacaggtaatataaaaagcttccatgattctatttatatgtacatgagaaggaacttccaggtgttactgtaattcctcaacgtattgtttcgacagcactaatttaatgccgatatactctagatgaagttttacattgttgagctattgctgttctcttgggaactgaactcactttcctcctgaggctttggatttgacattgcatttgaccttttatgtagtaattgacatgtgccagggcaatgatgaatgagaatctacccccagatccaagcatcctgagcaactcttgattatccatattgagtcaaatggtaggcatttcctatcacctgtttccattcaacaagagcactacattcatttagctaaacggattccaaagagtagaattgcattgaccacgactaatttcaaaatgctttttattattattattttttagacagtctcactttgtcgcccaggccggagtgcagtggtgcgatctcagatcagtgtaccatttgcctcccgggctcaagcgattctcctgcctcagcctcccaagtagctgggattacaggcacctgccaccatgcccggctaatttttgtaattttagtagagacagggtttcaccatgttgcccaggctggtttcgaactcctgacctcaggtgatccacccgcctcggcctcccaaagtgctgggattacaggcttgagcccccgcgcccagccatcaaaatgctttttatttctgcatatgttgaatactttttacaatttaaaaaaatgatctgttttgaaggcaaaattgcaaatcttgaaattaagaaggcaaaaatgtaaaggagtcaaaactataaatcaagtatttgggaagtgaagactggaagctaatttgcattaaattcacaaacttttatactctttctgtatatacattttttttctttaaaaaacaactatggatcagaatagccacatttagaacactttttgttatcagtcaatatttttagatagttagaacctggtcctaagcctaaaagtgggcttgattctgcagtaaatcttttacaactgcctcgacacacataaacctttttaaaaatagacactccccgaagtcttttgttcgcatggtcacacactgatgcttagatgttccagtaatctaatatggccacagtagtcttgatgaccaaagtcctttttttccatctttagaaaactacatgggaacaaacagatcgaacagttttgaagctactgtgtgtgtgaatgaacactcttgctttattccagaatgctgtacatctattttggattgtatattgtgtttgtgtatttacgctttgattcatagtaacttcttatggaattgatttgcattgaacacaaactgtaaataaaaagaaatggctgaaagagcaa

SEQ ID NO: 383 - DNA, 1899 bp, Artificial Sequence
  UGT2B4
gacagaaaggagcagcaactggaaaacaagcattgcattgcatcaggatgtctatgaaatggacttcagctcttctgctgatacagctgagctgttactttagctctgggagttgtggaaaggtgctggtgtggcccacagaattcagccactggatgaatataaagacaatcctggatgaacttgtccagagaggtcatgaggtgactgtattggcatcttcagcttccatttctttcgatcccaacagcccatctactcttaaatttgaagtttatcctgtatctttaactaaaactgagtttgaggatattatcaagcagctggttaagagatgggcagaacttccaaaagacacattttggtcatatttttcacaagtacaagaaatcatgtggacatttaatgacatacttagaaagttctgtaaggatatagtttcaaataagaaacttatgaagaaactacaggagtcaagatttgatgttgttcttgcagatgctgttttcccctttggtgagctgctggccgagttacttaaaataccctttgtctacagcctccgcttctctcctggctacgcaattgaaaagcatagtggaggacttctgttccctccttcctatgtgcctgttgttatgtcagaactaagtgaccaaatgactttcatagagagggtaaaaaatatgatctatgtgctttattttgaattttggttccaaatatttgacatgaagaagtgggatcagttctacagtgaagttctaggaagacccactacgttatctgagacaatggcaaaagctgacatatggcttattcgaaactactgggattttcaatttcctcacccactcttaccaaatgttgagttcgttggaggactccactgcaaacctgccaaacccctaccgaaggaaatggaagagtttgtccagagctctggagaaaatggtgttgtggtgttttctctggggtcgatggtcagtaacacgtcagaagaaagggccaatgtaattgcatcagcccttgccaagatcccacaaaaggttctgtggagatttgatgggaataaaccagatactttaggactcaatactcggctgtacaagtggataccccagaatgatcttcttgatataaagagaatgctatgaaattatcaagaattcatcatgatcaaccagtgaagccccttgatcgagcagtcttctggattgaatttgtcatgcgccataaaggagccaagcaccttcgggttgcagcccacgacctcacctggttccagtaccactctttggatgtgactgggttcctgctggcctgtgtggcaactgtgatattcatcatcacaaaatgtctgttttgtgtctggaagtttgttagaacaggaaagaaggggaaaagagattaattacgtctgaggctggaagctgggaaacccaataaatgaactcctttagtttattacaacaagaagacgttgtgatacaagagattcctttcttcttgtgacaaaacatctttcaaaacttaccttgtcaagtcaaaatttgttttagtacctgtttaaccattagaaatatttcatgtcaaggaggaaaacattagggaaaacaaaaatgatataaagccatatgaggttatattgaaatgtattgagcttatattgaaatttattgttccaattcacaggttacatgaaaaaaaatttactaagcttaactacatgtcacacattgtacatggaaacaagaacattaagaagtccactgacagtatcagtactgttttgcaaatactcagcatactttggatccatttcatgcaggattgtgttgttttaactgttgttgaggaagctaataaataattaaattgtaaaaaaaaaaaaaaaaa

SEQ ID NO: 384 - DNA, 2919 bp, Artificial Sequence
  MFAP5
taacatttggaatgagggtgtgagcaactgcaaattcccatctcccttctcattccagcctcattgtaacacacattctacgcctagcctggctttcttgctctccctcatctcattgtttcagcggaggccaaatctgaagtcctttccagggagtggctctgttcatcttattcgccagccaaagtaggaacagcgtaagaggagagagacacattcagcagccaaaggactcggtggaaagagcagaacaccatagacaatatgtcgctcttgggacccaaggtgctgctgtttcttgctgcattcatcatcacctctgactggatacccctgggggtcaatagtcaacgaggagacgatgtgactcaagcgactccagaaacattcacagaagatcctaatctggtgaatgatcccgctacagatgaaacagttttggctgttttggctgatattgcaccttccacagatgacttggagtgctgggatgagaaatttacctgcacaaggctctactctgtgcatcggccggttaaacaatgcattcatcagttatgcttcaccagtttacgacgtatgtacatcgtcaacaaggagatctgctctcgtcttgtctgtaaggaacacgaagctatgaaagatgagctttgccgtcagatggctggtctgccccctaggagactccgtcgctccaattacttccgacttcctccctgtgaaaatgtggatttgcagagacccaatggtctgtgatcattgaaaaagaggaaagaagaaaaaatgtatgggtgagaggaaggaggatctccttcttctccaaccattgacagctaacccttagacagtatttcttaaaccaatccttttgcaatgtccagcttttacccctactctctactttttcacccaaactgataacatttatctcattttctagcacttaaaatacaaagtctatattattgcataattttgctgcttctcaatatcatagacacagtgaatagatgatgactatatggcttatatacaaacattctatgtacaatttcaagggagactaaactttaggctaataatctttactattgaatctgtctgatatagatcttagggttgaagaagctatctttgtctatttgggctaaccatagaatttcatttattttcctcacaatattttcctagaccaactccccatcattcacgtgttcctctttactcttactttaactattttgctggcttgcccgaaaatttgcctggcaagtcttccttataagacacatcatggtaagttttgtagtcctgtaagattctgcaacacagtcaagaattatacaatcctactagcaatatataaggacccaaaatgtcttctgctaagctcagaggctggggctaaagcatgaggactatgccagctatagaacttggactcataattcgctatccaatttttcatgcagttgtctagtcgggaagtaaggttggaaactaagtctcatttactgattcgtttatgggtagtaccgggatgaacccaccaccacaaagcaaattagacaacttaatgtgaaatcataccattggttgacgtttccttgagttgctacttcgttcatcttcacaacttaacaagtgcacggtcgaattattgtgcaagtggcttttggatatcctgattggggcctaagaagggcattcagacttgaattttaataggcagacagaaagtttgcctaatagttaatacgaaagagtgaaagaaacacaatattcagacaacccacattcttatcctggctctagcagtaaccacgtagccttggataagccattttccttcattaggtcctggtttaatttcctcatctttaaaatgagaaggttaaatttatcttagtactgctgggcgcagtggctcatgcctgtaatctgagcactttgggaagctgaggcgggtggatcacttgaggtcagaaatttgagacgagcctggccaacatggtgaaaccccatctctactaaaaatacaaaaattagctgggcgtggtggcacgtgcctgtaatcccagctactcgggaggctgaggcaggagaatcaattgaacctgggaggcagaggttgcagtgagccgagatggcgccattgcactccagcctgggtgacaaaagcaaaagtccatcttaagaaatatatatatatattatatatattcttagttctaagatttcctttaattctatgattctctggatttaaatgcattattcatatttcttgaagcttagatacagtctaattcatagcaaccatatctgctttatcctaggtgagggtagcagtccacaatggaatagaagaaaatcccattataacaaatgacaaattatatatcatgaatccttctgtctgactaactcaataactttctataaaagccaatggaattcaaataggagctaggagacaacaagttatatatgacagtggaggttgtattccttttatattgctgagaaaactagttaaatgatcagattcttgctgttaagaaacaatttcgtttaatgggatctgtacaactgattttaaaaaaatgctacaaaaagccccaaagcatataatctctactccttacagtctctagaattaaatgtactcatttagacaacatattaaatgcatattttagccactttagagaaacctcataggcacagagtttccaagattaattttaagaatatcttcacgaacttgaccctcctactccacattgcaacatttccatcagacagcatttcaattccagtattatgtatattgcaaattaaacattttaaaatatttttttccaatttatttctcaaaataaaatgtcttttgttctggttaaaaaaaaaaaaaaa

SEQ ID NO: 385 - DNA, 3118 bp, Artificial Sequence
  SYDE1
ggggagggcgcggggcggcgcggccggagcccggggcgcgcactcggctcggcccggcccgggccgcagcatggccgagccgctactcaggaaaaccttctcccgcctgcggggccgggagaaacttccccggaaaaagtcggacgccaaggagcgcgggcctggggtacctggcactggggagcccgccggcgagatctggtacaaccccatccctgaggaagaccccagacctccagcacctgagcccccggggccacagcctggctcagctgagtcagagggcctggccccccaaggtgcagcccccgccagccccccaaccaaagcctcccgcaccaagtccccgggccccgccaggcgcctctccataaagatgaagaagctgccggaactgcggcgccgcctgagcctgcgaggcccccgggctggcagggagcgcgagagggctgcccctgcgggctccgtcatcagccgctaccacctggacagcagcgtggggggccccgggccggcagcagggcctgggggcacccggagcccgagggccggttacctcagcgacggggactcaccggagcgcccagctgggcccccatcacccacctccttccggccctacgaggtgggtcccgcagcccgggcacccccggccgcactctggggccgcctcagcctgcacctgtacggtctcggggggctgcggccagcgccgggggccacccccagggacctctgctgcctactgcaagtggatggggaggccagggcccgaacagggccactgcgaggggggccggacttcctgcggctggaccacaccttccacctggagctggaggccgccaggctcctgcgcgccctggtgcttgcgtgggaccctggcgtgagaaggcaccggccctgtgcccagggcaccgtgctgctgcccacggtcttccgagggtgccaggcccaacagctggccgtgcgcctggagcctcaggggctgctgtatgccaagctgaccctgtcggagcagcaggaagcccctgccacagctgagccccgcgtctttgggctgcccctgccactgctggtggagcgggagcggccccccggccaggtgcccctcatcatccagaagtgcgttgggcagatcgagcgccgagggctgcgggtagtgggactgtaccgtctttgtggctcagcggcagtgaagaaagagcttcgggatgcctttgagcgggacagtgcagcggtctgcctatctgaggacctgtaccccgatatcaatgtcatcactggcatcctcaaggattatcttcgagagttgcccaccccactcatcacccagcccctgtataaggtggtactggaggccatggcccgggaccccccaaacagagttccccccaccactgagggcacccgagggctcctcagctgcctgccagatgtggaaagggccacgctgacgcttctcctggaccacctgcgcctcgtctcctccttccatgcctacaaccgcatgaccccacagaacttggccgtgtgcttcgggcctgtgctgctgccggcacgccaggcgcccacaaggcctcgtgcccgcagctccggcccaggccttgccagtgcagtggacttcaagcaccacatcgaggtgctgcactacctgctgcagtcttggccagatccccgcctgccccgacaatctccagatgtcgcgccttacttgcgacccaaacgacagccacctctgcacctgccgctggcagaccccgaagtggtgactcggccccgcggtcgaggaggccccgaaagccccccgagcaaccgctacgccggcgactggagcgtttgcgggcgggacttcctgccctgtgggcgggatttcctgtccgggccagactacgaccacgtgacgggcagtgacagcgaggacgaggacgaggaggtcggcgagccgagggtcaccggtgacttcgaagacgacttcgatgcgcccttcaacccgcacctgaatctcaaagacttcgacgccctcatcctggatctggagagagagctctccaagcaaatcaacgtgtgcctctgagccagatgacggggtgggaccccggttagtaaggaccgggcgcccagtggctaaggcggtgccctggtgaccaaggagagccagacctgttgctcaggccgagctcctggttgccagcgagttaccacgggaccagtcgcgtgtatggctgagactcattcccagtttccagggcccggtatttggacactagttgccaagtctggggcctggggattttagggaccagcggttgtgaccatctttcctgagcaccaagggcttccccttttgttgccaaaaaggtagttctcgcgcttgctaggctggcctctcttgcctccccttggccggggcaacaccagttactgtgagcatcaccctggtgtggtgagtcacctctagtcggccctcttgctgctgccaaccaaatcagtattagctttgagcactgcactgtttctccctcccttggacgacacaaagactagcatgaggcactgtttgtggggggcagcccctatcctgggttccagcatggacacaggggtagcctggggcttatagagaaacagctggtttcccctacccttttccggggaagaccccacgattggcctctagtcagcaaatggagataacagagtctggcctttccaatccccatctccttgccccccccttgcccccccccccgaaaaaaattgagcacttaaacccctcccttttggagggggccccctgaagcgtcaggctgggggcagtctggtacggaacatatttattgcctccatgcatgtgtgtgtgtgtctgtgaggactggtgtgcgtggacacgtctgaagcaggcgtgtggggctctttcagggaccacagaggagggagcagtttgcagtgcccagccaccctgaaatccccaataatggtgcctcagtgggccccagagttccagtgggagagtacggttccctcctgtctccctcttcttttccgcacctccatctttgtggataataaataaatatgcacaggttctgagactgagtaaaaaaaaaaaaaaaaa

SEQ ID NO: 386 - DNA, 9455 bp, Artificial Sequence
  QKI
tgaactgaggcgaactccgccgccaagtgagtgaggaggaggaggaggagaaggaggaggaggaagaggaggagcgcagtcggagcgcggcggcagcggcagaggcgccgcggcggggaccagcccagagagaccccccgagcccgcggcacaggcggcggcggcgctgagcgggctcgaccagccgagcgagcggcggccccggctcctcctcgtccggcgccagcagcccgcgccccgcgcccgcactcggccagccgagacccgcctcccgcccgcccgccggcctcgtgagggacgcgccgagccgggcggccgagagcggcggcggctgggagcgcgtcgggcccgggcggaaagtgcctgcggggggcgggcgagcgcgcggtgccggccgccccggggctcggcgcgggagccagagcgggagccggcgcggagcgggacgccgggtcccgagcggcccgcggccggggctcgcccccgcccctccctcctctccggcggcggcggcggcggcggcgggcggagtgagctgcggagcctggaatatggtcggggaaatggaaacgaaggagaagccgaagcccaccccagattacctgatgcagctgatgaacgacaagaagctcatgagcagcctgcccaacttctgcgggatcttcaaccacctcgagcggctgctggacgaagaaattagcagagtacggaaagacatgtacaatgacacattaaatggcagtacagagaaaaggagtgcagaattgcctgatgctgtgggacctattgttcagttacaagagaaactttatgtgcctgtaaaagaatacccagattttaattttgttgggagaatccttggacctagaggacttacagccaaacaacttgaagcagaaaccggatgtaaaatcatggtccgaggcaaaggctcaatgagggataaaaaaaaggaggagcaaaatagaggcaagcccaattgggagcatctaaatgaagatttacatgtactaatcactgtggaagatgctcagaacagagcagaaatcaaattgaagagagcagttgaagaagtgaagaaattattggtacctgcagcagaaggagaagacagcctgaagaagatgcagctgatggagcttgcgattctgaatggcacctacagagatgccaacattaaatcaccaacagcccaggctgctccaaggatcattactgggcctgcgccggttctcccaccagctgccctgcgtactcctacgccagctggccctaccataatgcctttgatcagacaaatacagaccgctgtcatgccaaacggaactcctcacccaactgctgcaatagttcctccagggcccgaagctggtttaatctatacaccctatgagtacccctacacattggcaccagctacatcaatccttgagtatcctattgaacctagtggtgtattaggtgcggtggctactaaagttcgaaggcacgatatgcgtgtccatccttaccaaaggattgtgaccgcagaccgagccgccaccggcaactaacctatgaccttctgacctctgaactcttcacccaatgatgacctgaccatgcctgcctgctgatcagttaactggtaatcgcctttgcttgcctgtcgtcagtgcagcgagctgaggcacttgtccgttcgtcttaccatctaaccaaacaaaagacaaagaaattgttgtcctccaactcagctttttttttttttttttcctgtttgggtgaaagtggttctagaaactgcactgaatagtagtaaagcaataaggcccaattcatcccacagcactgatcatcttttaatatcccaccctaagcgaacggtaagaaggcctctcttaagaaggggagacagatggtccttaactactcaatgacagaggcagttactgtgagagacttctaggaatctttttcttctcatagcgaagtcaaagctctctctgaatgtactgtgtgatgatgcatcatgcatgaaccttcggtcagggatatcattggtgaagtgatttcaaaaagtattcaaaatttgatatgctgtttagtcactacagtgccctcaaagggcagaagttgcagccttttttatattgcctgccaaaatttgaagtattagaagaaagtgtgccatgagagaaaaacttaaggagttttgaaaagtaatgcaaataacaaaactgcaacactatttttaaaaagataaatatctgagttaaaattactgaatctttattttacacctaaaaaaatatgagaacaaggtacatgcattatgtgtcacattactgggcaaactgttcaagtatttttttttaaacctccctgtatagaaaaaaatcattaaggatgtaaaagccatgcttgcctatttgctgtatacatgtaatgaaattgtagataaagtgtagtgcattgaaacaaatgaacaaaaagtagatacttttactatacaagggtgctggtgcagaaaaaaatatatatatttttggaaatgtagcattttatactttcaagtgttataaaaaaaaagaaaaagaacaaagaaaccctttatttcattaaatgattttttctggtggttgtcaagaaacaaaagaccaaaagagcctttttgtctttcttttttattttttaagtattggaataagtctaaagaaaagaaagtgccttattttccttcatggtcattcagtcaagtgtctcataaagatcagctcctccctcagaatacaagttaatgcatgttactcagtcgcccagtatgtgaaagaagatatgagggagacaaatgagttgatagtttgaattataggatttttgccacgttaccttgatgcaaatttgccaaatctgatactgtgaaaagatttgataacttttctaatgcctgactagtaagttttaaaacatcattctttaaaagaatagtttaatacttttggttattccaatcttcaatgttaacccaaaggattctgagataaaaattatgtgtcatctaaacttcagtttacagacaaaattagagctttgttttatttggagaagggggatgcattcatttgattttgttttttgtttttaattaattgaatataataggatacctagcaaatgttttcacaaaagtgaatctttgtgattttcattctagaaaacaatgttttaaatcacccaaatttaatcacatgtctttatatcataccagataactggtgtagtgtatccttttactgtttcaataacctctgcctcccccaccccttaactttaaaagaatgtgaaaaactagcatcatagtgcatataaatactcaaccacatttcagcttaagcttctaatttctcaagaagttgaaacagttagttatgtagttgaagcaatttgtgtgcaaagcctacatctaaacacttgagtgaataatcattaactgctcagtaccagacgtggcaaatctcaagtgacagtggacccccccccccgcccagcttatcaactcgtcccctcttccacaccttcccagcatcacagtcagaggtcagcaggaagctgagtcattaccttcttggtgacctcccccaccatcttgtctcacttggaaaccgttgtcagtttatttactatgcaatagacattcattgttttgtatccagctagctttggtttaatatgccactgctttgtctttctgttacacatacagttttgatttatttacaatatatgctgtgccattttgatttttatattgtttggttggttgaataaatttgcgacactcaaacacttgaggtgatagttgttaaaaacaataccagtatttgatccagtttcatctcaactatgttatacctggacattttagatgtttatcaaaggtcttttatggggaagaaagtaaatgtatgaaataataaatgtgtgacatttatagggaatgttggctctgaacaaacttttgaaaacttggttgacaaaattttggatcaactgaaaaaagcatgacttttgaaatctctgaatgccttggttctcagtattatcattctttattgaatttatttcttattaaaatatgtagtttttaagactttttttctgacagtattatgtaattttttagcgtgggtagatgggagtgtcgcttgtatgttatcgtacagctgacatgtatttttgtctattctttattatcttagtttcatgctatgtatgtaccataaccaacctattgcctatgagaaacatgtaagataatgtatttacagccattgttacaagtttataatgtatttttctatcttgttttatatgtatgttatataacattcaaaaagaatttttttcttgattgagaaaaggatacaaaatgcaaaatccacaattttgataactgaaaattgccaattgttttgcagtactttattatattgggtgtcttgtcttttttgggcttttagttagctaatgaatgaatacattagacacttttgggttttagttgggattttacatagcttgcattttaattctttggttctttgctgtttctattaacccacagcattattttaataaatgttataataccaacctactaactctggactttgtctgtttattaacctttatatgtttaattaaaataaacaaataaagacaaaagaatgtaaagtcttgagttactggactaaccctgaagaacgtgaccacagataacatagtgtgacttgtttttatgttgtttgtcagctgacagttttgcacactactgttaaaatggctttggttattctggtcttttagcttgggggccggggcgggtgtgggtgtaggtgcagtagagatgggaacaaagtagcctttgtttgaggcattcttctcttgccacttgcctttcagcatctgcattactaattccacaccttatttttccttctccaaaataatcactgtctgctcacagcatcgagtaaaaagatacattgtcatggtatatacctggagaaaccagtttgattctttgttgaaccatttcttttaatttctgtaaataagtaattttatggtcacattgtaaagcagagaaactgttgatattttacctttatttagatttttgttttaacttgacctttttcctttggaaagcgttgaacttgtttagctaactactcctattaggggagcttaacttgggtaaagtcaaaggcccactggctgtttctcatggtggcctgaagccccgctgctttccagtgaggaaaagaaccctcagcacgttactgagctttcctcaggtatttttttctctgtcacctactttacaaatacagtcagactaaaacattaaacaagaagtttaagggggaataacattgggatttgaaaagttgtatgtgattaatttcttgcatgcaaatcaatttaagatttcttaaatatcttcatgcttttcttggctggaacttgggtaaattaacctgtaattatgaattatttagtttaactcaaggtgcatttttatttcacagattgatacttgcttttttctgtgaaacagttctcctagataccaaaatcctcaggatgaatttttgcatttgtaaataacaatttatctttgtaaattacattttatttatttagagttctaaaattgagggctgaaatgaatgacatgtaatagaagacaaaactgtaccaatacgctgttaaccaatcagactgtccaggtattctcatttcataaatatgtatacacacatataaatacacagagtagtgttagctgatgtgagtgataacagcgaatcaccattgagatggtcatttggatcatgtaaacaaaccgtgtcatgtctctgatgggagcggtgggtagtgtactgttaggtggacaggtcttttaacatgctactatttgtaaaagtttccgttgccataacagttcatgtagtagtctgtgaaaattcgaagctgtctgtcaagctgctaatatacaagttgtcatggtaccatgtaacttaaattgatgaatttctatgcaatttactattctctgaagcctatgaatgcagcctcatctcattttcagttaagggtactttatgtataattatgtcattgctgccttttatgtaggaaatgtaaaaaagttttaaaaggcgaaaataacattacagatttcatttttatacaggttacaatattaaacatgaaactaccaaattccaagaatagtaaaattctagagtcagttgattgattgaaactatttgacaaaacagttgaaagctgagctttcagtcaagaagttggtgaaattaatgtccttaaacttttcctttaggcaaaatgtcagggaaaacttaacatgaaagtagttactcccatacgcaccagtgcagtagctccaggtgtaagaggtcacgaaggcaccctgcccataaaaccaggatgtgcatacgtacacacaatcggtgtctggttatggttttctaaacactacataaggatctgaattttttagtgtgccaaaagcaaacgataggtttaaatgaaattgctcactaccaaatcaagactcttcatatatatacgtgtgtgtatatatatatgtcataacactttcacgtgtgacagcctaaggtttctttagttttaggatggggtggggtgggagtggttttgcatgtttgaccaggatgtgatgcctgtctttattccttgataagaagtagctgttacagcatttcaagcaaattattttaggtagaatagaacttactgccaaatgattatttatttagcaaaaattattctccaacttttcgaattcacaatttttctaagtgcatagagtagttttttacattgtcacgaattccttaatacctttatttaaaatggaaaaaatatggacaatattttagaaatatgtgctacacatctaattttatctgtagtttaagtgatctaaattgagatgcctttgatatgaagagatttaccaacattatatgcactcgtgccttcaatgtggaatcaaactggttaacctcagcacagtcctctcgtttctgtgtttctgctgcactaattgccagggggtgggggagaaggcgaatgaattaattcatagtagaaggaggcgataggtgcagcaaagggcagccacagtgttgattccacattataatgttgttgcctcttcttggcaaaagacaccacattgtgggaagatctcagcttccagggtaaaagttaatttataacttaaaagtgctattaagtttttattaccaaatatatcttttatggtttatattgtagtggtatgtatgaaacatttaaaattttactgtggaaattgtgtatatatatatatatagtcgaaataggtgttcacaggtcacatgtgaacggagaactgcatgaccgtacatgaaatgcaataaaccaactggaaaaagtgcatgtgcttcatcctctcaagccaactgcagctggaaagtgctgcttatcctccacccccagaaaatgcatgtatcaatatgagaataaagaacgcacactttcaattttattgaggctttcaacactatttaaaagaaaatgtaagaatttgacattctggagttattataacattagaaaatgagcataacattcactctgattttagccattaagggagattagtaaacagactgctacagtgttccatagttggactgtgcatccaaaacatttttttatctttaataaatggtacagtttttatgtagttttcgaatgtaagaagaaaggaatgctgaccaaaacttgatttcatcagcttcatgaaaaggactagtgtcattaacctgttgaacagaattggtttattaaaaaaatcatttccagtagtgtgaaacctttacgagtctttaacatctaaatgttatgactccttgtaccttaagttttccagtctttcttatttatatcatctccaagtacctctggctcctttcctcttgctcaccggaaccttagttttcctcaacagaatgctttgttaaagtagcccacagttgcaggatccatagcaccgtcgtgcagactagcagcccaaaggtgtgtttggtttggcttatacggtgttttgctttttaaactacttgccataatttaaaagtggcaacactagacttaaaaaaaaaaaagtctgattgcccatattagattttttttttaattcttcacaaaatctgctcttcctgaaagatcaaagtgtctagaaagcccaaacatgtattcttaacatagtaggcaccagctgaaactgagtaattaaacggtcccctgaagccaagtattccctggttagtcgccaccccaccactccttcctgtctctagtgtcacacttgggctgttgattttcttactcttctcttgctttaatccttccccccggctctctggctcctgtggatatctgtgcttgtttcctggtccaggatggtgatctgactttcaaaccagcttctcaaaaggggtgacataaaatcagttttgatgtttttcctcctgaaaaatcagatgaatattttagtcactgttactcatgcacattgtgttcttatgtttacagaagtgcttaagtgaatggaagcactagacatttggatttccttcctaacgtaatttttaatgattaccccttttatacagtaatttgtggtctttagaaagcagttaaactaattgaccatctaatagttgtactatacatatgtctaaaataatagtcatggtaagtttggcatcatatcttccccaaaaaatgtttattaaaattagattattccagtttaatgctattttgtgaactgtataccctctgaaagcgcttatttttacatgctacacaacagttccaattttaaggagtgtctcctaaaattgggatgaaaatctactgtagtctgttttaaagtatgctatactatgttcattggttacttaactggatattaatataaaggttattacaagaaaaatgatgaagagcaaaaggagaagaaaatatttgcaagtgaatccacaattcttgcagaactatttgagttgatactaaagattttatgttcactcctttaccttagaactgtcaagcttgggaatgaggaaagtgccttggctgtgcttgaaacctgaattttagtgcttcccttattacattcattgttttcaatgattgatttataaaattaagacatactggtagtacaagttgaaagttggtttgaatacattttaattaaatgataatatgttaatatgcttttgttcattgctttctcactgaggtaaaacagcattaaaaagttgtccagaatttaaactgaaaaaaaaaaaaaaaaa

SEQ ID NO: 387 - DNA, 2157 bp, Artificial Sequence
  CCR7
cacttcctccccagacaggggtagtgcgaggccgggcacagccttcctgtgtggttttaccgcccagagagcgtcatggacctgggtatgcctgtgtcaagatgaggtcacggacgattacatcggagacaacaccacagtggactacactttgttcgagtctttgtgctccaagaaggacgtgcggaactttaaagcctggttcctccctatcatgtactccatcatttgtttcgtgggcctactgggcaatgggctggtcgtgttgacctatatctatttcaagaggctcaagaccatgaccgatacctacctgctcaacctggcggtggcagacatcctcttcctcctgacccttcccttctgggcctacagcgcggccaagtcctgggtcttcggtgtccacttttgcaagctcatctttgccatctacaagatgagcttcttcagtggcatgctcctacttctttgcatcagcattgaccgctacgtggccatcgtccaggctgtctcagctcaccgccaccgtgcccgcgtccttctcatcagcaagctgtcctgtgtgggcatctggatactagccacagtgctctccatcccagagctcctgtacagtgacctccagaggagcagcagtgagcaagcgatgcgatgctctctcatcacagagcatgtggaggcctttatcaccatccaggtggcccagatggtgatcggctttctggtccccctgctggccatgagcttctgttaccttgtcatcatccgcaccctgctccaggcacgcaactttgagcgcaacaaggccatcaaggtgatcatcgctgtggtcgtggtcttcatagtcttccagctgccctacaatggggtggtcctggcccagacggtggccaacttcaacatcaccagtagcacctgtgagctcagtaagcaactcaacatcgcctacgacgtcacctacagcctggcctgcgtccgctgctgcgtcaaccctttcttgtacgccttcatcggcgtcaagttccgcaacgatctcttcaagctcttcaaggacctgggctgcctcagccaggagcagctccggcagtggtcttcctgtcggcacatccggcgctcctccatgagtgtggaggccgagaccaccaccaccttctccccataggcgactcttctgcctggactagagggacctctcccagggtccctggggtggggatagggagcagatgcaatgactcaggacatccccccgccaaaagctgctcagggaaaagcagctctcccctcagagtgcaagcccctgctccagaagatagcttcaccccaatcccagctacctcaaccaatgccaaaaaaagacagggctgataagctaacaccagacagacaacactgggaaacagaggctattgtcccctaaaccaaaaactgaaagtgaaagtccagaaactgttcccacctgctggagtgaaggggccaaggagggtgagtgcaaggggcgtgggagtggcctgaagagtcctctgaatgaaccttctggcctcccacagactcaaatgctcagaccagctcttccgaaaaccaggccttatctccaagaccagagatagtggggagacttcttggcttggtgaggaaaagcggacatcagctggtcaaacaaactctctgaacccctccctccatcgttttcttcactgtcctccaagccagcgggaatggcagctgccacgccgccctaaaagcacactcatcccctcacttgccgcgtcgccctcccaggctctcaacaggggagagtgtggtgtttcctgcaggccaggccagctgcctccgcgtgatcaaagccacactctgggctccagagtggggatgacatgcactcagctcttggctccactgggatgggaggagaggacaagggaaatgtcaggggcggggagggtgacagtggccgcccaaggcccacgagcttgttctttgttctttgtcacagggactgaaaacctctcctcatgttctgctttcgattcgttaagagagcaacattttacccacacacagataaagttttcccttgaggaaacaacagctttaaaagaaaaagaaaaaaaaagtctttggtaaatggcaaaaaaaaaaaaaaaaaaaaaaaaa

SEQ ID NO: 388 - DNA, 4693 bp, Artificial Sequence
  ANLN
cccagcgcgcatgctcgcggctcggcgctgaaattcaaatttgaacggctgcagaggccgagtccgtcactggaagccgagaggagaggacagctggttgtgggagagttcccccgcctcagactcctggttttttccaggagacacactgagctgagactcacttttctcttcctgaatttgaaccaccgtttccatcgtctcgtagtccgacgcctggggcgatggatccgtttacggagaaactgctggagcgaacccgtgccaggcgagagaatcttcagagaaaaatggctgagaggcccacagcagctccaaggtctatgactcatgctaagcgagctagacagccactttcagaagcaagtaaccagcagcccctctctggtggtgaagagaaatcttgtacaaaaccatcgccatcaaaaaaacgctgttctgacaacactgaagtagaagtttctaacttggaaaataaacaaccagttgagtcgacatctgcaaaatcttgttctccaagtcctgtgtctcctcaggtgcagccacaagcagcagataccatcagtgattctgttgctgtcccggcatcactgctgggcatgaggagagggctgaactcaagattggaagcaactgcagcctcctcagttaaaacacgtatgcaaaaacttgcagagcaacggcgccgttgggataatgatgatatgacagatgacattcctgaaagctcactcttctcaccaatgccatcagaggaaaaggctgcttcccctcccagacctctgctttcaaatgcctcggcaactccagttggcagaaggggccgtctggccaatcttgctgcaactatttgctcctgggaagatgatgtaaatcactcatttgcaaaacaaaacagtgtacaagaacagcctggtaccgcttgtttatccaaattttcctctgcaagtggagcatctgctaggatcaatagcagcagtgttaagcaggaagctacattctgttcccaaagggatggcgatgcctctttgaataaagccctatcctcaagtgctgatgatgcgtctttggttaatgcctcaatttccagctctgtgaaagctacttctccagtgaaatctactacatctatcactgatgctaaaagttgtgagggacaaaatcctgagctacttccaaaaactcctattagtcctctgaaaacgggggtatcgaaaccaattgtgaagtcaactttatcccagacagttccatccaagggagaattaagtagagaaatttgtctgcaatctcaatctaaagacaaatctacgacaccaggaggaacaggaattaagcctttcctggaacgctttggagagcgttgtcaagaacatagcaaagaaagtccagctcgtagcacaccccacagaacccccattattactccaaatacaaaggccatccaagaaagattattcaagcaagacacatcttcatctactacccatttagcacaacagctcaagcaggaacgtcaaaaagaactagcatgtcttcgtggccgatttgacaagggcaatatatggagtgcagaaaaaggcggaaactcaaaaagcaaacaactagaaaccaaacaggaaactcactgtcagagcactcccctcaaaaaacaccaaggtgtttcaaaaactcagtcacttccagtaacagaaaaggtgaccgaaaaccagataccagccaaaaattctagtacagaacctaaagaagtgatacgtgaaattgagatgagtgtggatgatgatgatatcaatagttcgaaagtaattaatgacctcttcagtgatgtcctagaggaaggtgaactagatatggagaagagccaagaggagatggatcaagcattagcagaaagcagcgaagaacaggaagatgcactgaatatctcctcaatgtctttacttgcaccattggcacaaacagttggtgtggtaagtccagagagtttagtgtccacacctagactggaattgaaagacaccagcagaagtgatgaaagtccaaaaccaggaaaattccaaagaactcgtgtccctcgagctgaatctggtgatagccttggttctgaagatcgtgatcttctttacagcattgatgcatatagatctcaaagattcaaagaaacagaacgtccatcaataaagcaggtgattgttcggaaggaagatgttacttcaaaactggatgaaaaaaataatgcctttccttgtcaagttaatatcaaacagaaaatgcaggaactcaataacgaaataaatatgcaacagacagtgatctatcaagctagccaggctcttaactgctgtgttgatgaagaacatggaaaagggtccctagaagaagctgaagcagaaagacttcttctaattgcaactgggaagagaacacttttgattgatgaattgaataaattgaagaacgaaggacctcagaggaagaataaggctagtccccaaagtgaatttatgccatccaaaggatcagttactttgtcagaaatccgcttgcctctaaaagcagattttgtctgcagtacggttcagaaaccagatgcagcaaattactattacttaattatactaaaagcaggagctgaaaatatggtagccacaccattagcaagtacttcaaactctcttaacggtgatgctctgacattcactactacatttactctgcaagatgtatccaatgactttgaaataaatattgaagtttacagcttggtgcaaaagaaagatccctcaggccttgataagaagaaaaaaacatccaagtccaaggctattactccaaagcgactcctcacatctataaccacaaaaagcaacattcattcttcagtcatggccagtccaggaggtcttagtgctgtgcgaaccagcaacttcgcccttgttggatcttacacattatcattgtcttcagtaggaaatactaagtttgttctggacaaggtcccctttttatcttctttggaaggtcatatttatttaaaaataaaatgtcaagtgaattccagtgttgaagaaagaggttttctaaccatatttgaagatgttagtggttttggtgcctggcatcgaagatggtgtgttctttctggaaactgtatatcttattggacttatccagatgatgagaaacgcaagaatcccataggaaggataaatctggctaattgtaccagtcgtcagatagaaccagccaacagagaattttgtgcaagacgcaacacttttgaattaattactgtccgaccacaaagagaagatgaccgagagactcttgtcagccaatgcagggacacactctgtgttaccaagaactggctgtctgcagatactaaagaagagcgggatctctggatgcaaaaactcaatcaagttcttgttgatattcgcctctggcaacctgatgcttgctacaaacctattggaaagccttaaaccgggaaatttccatgctatctagaggtttttgatgtcatcttaagaaacacacttaagagcatcagatttactgattgcattttatgctttaagtacgaaagggtttgtgccaatattcactacgtattatgcagtatttatatcttttgtatgtaaaactttaactgatttctgtcattcatcaatgagtagaagtaaatacattatagttgattttgctaaatcttaatttaaaagcctcattttcctagaaatctaattattcagttattcatgacaatatttttttaaaagtaagaaattctgagttgtcttcttggagctgtaggtcttgaagcagcaacgtctttcaggggttggagacagaaacccattctccaatctcagtagttttttcgaaaggctgtgatcatttattgatcgtgatatgacttgttactagggtactgaaaaaaatgtctaaggcctttacagaaacatttttagtaatgaggatgagaactttttcaaatagcaaatatatattggcttaaagcatgaggctgtcttcagaaaagtgatgtggacataggaggcaatgtgtgagacttgggggttcaatattttatatagaagagttaataagcacatggtttacatttactcagctactatatatgcagtgtggtgcacattttcacagaattctggcttcattaagatcattatttttgctgcgtagcttacagacttagcatattagttttttctactcctacaagtgtaaattgaaaaatctttatattaaaaaagtaaactgttatgaagctgctatgtactaataatactttgcttgccaaagtgtttgggttttgttgttgtttgtttgtttgtttgtttttggttcatgaacaacagtgtctagaaacccattttgaaagtggaaaattattaagtcacctatcacctttaaacgcctttttttaaaattataaaatattgtaaagcagggtctcaacttttaaatacactttgaacttcttctctgaattattaaagttctttatgacctcatttataaacactaaattctgtcacctcctgtcattttattttttattcattcaaatgtattttttcttgtgcatattataaaaatatattttatgagctcttactcaaataaatacctgtaaatgtctaaaggaaaaaaaaaaaaaaaa

SEQ ID NO: 389 - DNA, 7198 bp, Artificial Sequence
  MYT1L
gcatttgtcattcctgcccgggcgacattttttttttccctaagctactgcacactaaacagtgagagagcttttccctgcagtcttgttgaagcaccccgggttttttgctcattgttggtgggtgcattttaattttttcattccctggactatgggttatgatatccatactcactgaagacaaaaagccaccttttctgcgtcttggtggcatgcatgtgtctcatcatcctttcaaacttgtggtggaacagggttttcttccctgtctgtgtattttgagccagcacagttaccaaaattgaacttgtctttcgcttgtgagcggttgtggtcattgtgagggcgggtcatgaggaggctgtagccaaggacgaggtgtgtgcggctgttgcctggacgtttgtccaatccacgttgacatttgagggatcacagcgtgtgaaaatgaactcagaggagaattggtgaattcctatccagtgggcatcttcaaaccctggtcgacggcggaagaatatcaggtcctgagatcacccacccggcgcggcaacagtgcagagtggccacatctggtggaagaagaaaaaaatgtagttattgaattcaatcaagtgtttgcatctttcaagctatcaacaaaattccatcaagaaaggttccagttggtctcacagacgtatggatatccgaggagccacctaaagatggagaaatcaaggcatagagagattaagtgactttgccacagtcacaagctggagaggaccaggagtagagcttagagcgagcccctgactctgggcctgcgtcctgccaggagtcacgctgcctccgttcctaggagagaagacttcctgtaagatggaggtggacaccgaggagaagcggcatcgcacgcggtccaaaggggttcgagttcccgtggaaccagccatacaagagctgttcagctgtcccacccctggctgtgacggcagtggtcatgtcagtggcaaatatgcaagacacagaagtgtatatggttgtcccttggcgaaaaaaagaaaaacacaagataaacagccccaggaacctgctcctaaacgaaagccatttgccgtgaaagcagacagctcctcagtggatgagtgtgacgacagtgatgggactgaggacatggatgagaaggaggaggatgagggggaggagtactccgaggacaatgatgagccaggggatgaggacgaggaggacgaggagggggaccgggaggaggaggaggagatcgaggaggaggatgaggacgatgacgaggatggagaagatgtggaggatgaagaagaggaagaggaggaggaggaggaggaggaagaggaagaagaaaacgaagaccatcaaatgaattgtcacaatactcgaataatgcaagacacagaaaaggatgataacaataatgacgaatatgacaattacgatgaactggtggccaagtcattgttaaacctcggcaaaatcgctgaggatgcagcctaccgggccaggactgagtcagaaatgaacagcaatacctccaatagtctggaagacgatagtgacaaaaacgaaaacctgggtcggaaaagtgagttgagtttagacttagacagtgatgttgttagagaaacagtggactcccttaaactattagcccaaggacacggtgttgtgctctcagaaaacatgaatgacagaaattatgcagacagcatgtcgcagcaagacagtagaaatatgaattacgtcatgttggggaagcccatgaacaacggactcatggaaaagatggtggaggagagcgatgaggaggtgtgtctgagcagtctggagtgtttgaggaatcagtgcttcgacctggccaggaagctcagtgagaccaacccgcaggagaggaatccgcagcagaacatgaacatccgtcagcatgtccggccagaagaggacttccccggaaggacgccggacagaaactactcggacatgctgaacctcatgcggctggaggagcagttgagcccccggtcgagagtgtttgccagctgtgcgaaggaggatgggtgtcatgagcgggacgacgataccacctctgtgaactcggacaggtctgaagaggtgttcgacatgaccaaggggaacctgaccctgctggagaaagccatcgctttggaaacggaaagagcaaaggccatgagggagaagatggccatggaagctgggaggagggacaatatgaggtcatatgaggaccagtctccgagacaacttcccggggaggacagaaagcctaaatccagtgacagccatgtcaaaaagccatactatggtaaagatccctcaagaacagaaaagaaagagagcaagtgtccaacccccgggtgtgatggaaccggccacgtaactgggctgtacccacatcaccgcagcctgtccggatgcccgcacaaagatagggtccctccagaaatccttgccatgcatgaaagtgtcctcaagtgccccactccgggctgcacggggcgcgggcatgtcaacagcaacaggaactcccaccgaagcctctccggatgcccgatcgctgcagcagagaaactggccaaggcacaggaaaagcaccagagctgcgacgtgtccaagtccagccaggcctcggaccgcgtgctcaggccaatgtgctttgtgaagcagctggagattcctcagtatggctacagaaacaatgtccccacaactacgccgcgttccaacctggccaaggagctcgagaaatattccaagacctcgtttgaatacaacagttacgacaaccatacttatggcaagcgagccatagctcccaaggtgcaaaccagggatatatcccccaaaggatatgatgatgcgaagcggtactgcaaggaccccagccccagcagcagcagcaccagcagctacgcgcccagcagcagcagcaacctgagctgcggcgggggcagcagcgccagcagcacgtgcagcaagagcagcttcgactacacgcacgacatggaggcggcccacatggcggccaccgccatcctcaacctgtccacgcgctgccgcgagatgccgcagaacctgagcaccaagccgcaggacctgtgcgccacgcggaaccctgacatggaggtggatgagaacgggaccctggacctcagcatgaacaagcagaggccgcgggacagctgctgccccatcctgacccctctggagcccatgtccccccagcagcaggcagtgatgaacaaccggtgtttccagctgggcgagggcgactgctgggacttgcccgtagactacaccaaaatgaaaccccggaggatagacgaggacgagtccaaagacattactccagaagacttggacccattccaggaggctctagaagaaagacggtatcccggggaggtgaccatcccaagtcccaaacccaagtaccctcagtgcaaggagagcaaaaaggacttaataactctgtctggctgccccctggcggacaaaagcattcgaagtatgctggccaccagctcccaagaactcaagtgccccacgcctggctgtgatggttctggacatatcaccggcaattatgcttctcatcggagcctttcaggttgcccaagagcaaagaaaagtggtatcaggatagcacagagcaaagaagataaagaagatcaagaacccatcaggtgtccggtccccgggtgcgacggccagggccacatcactgggaagtacgcgtcccatcgcagcgcctccgggtgccccttggcggccaagaggcagaaagacgggtacctgaatggctcccagttctcctggaagtcggtcaagacggaaggcatgtcctgccccacgccaggatgcgacggctcaggccacgtcagcggcagcttcctcacacaccgcagcttgtcaggatgcccgagagccacgtcagcgatgaagaaggcaaagctttctggagagcagatgctgaccatcaaacagcgggccagcaacggtatagaaaatgatgaagaaatcaaacagttagatgaagaaatcaaggagctaaatgaatccaattcccagatggaagccgatatgattaaactcagaactcagattaccacgatggagagcaacctgaagaccatcgaagaggagaacaaagtgattgagcagcagaacgagtctctcctccacgagctggcgaacctgagccagtctctgatccacagcctggctaacatccagctgccgcacatggatccaatcaatgaacaaaattttgatgcttacgtgactactttgacggaaatgtatacaaatcaagatcgttatcagagtccagaaaataaagccctactggaaaatataaagcaggctgtgagaggaattcaggtctgaacagctgctgtagtgatgaaactcttgcttaaaaaggatgcctcttgttttttgctgctgtaacttaccagaaagtgttctatatttatttctgtttgaatttgaaacagtgttatgcttacaagacttcataatgattttatgtcttgctttaaagatagtacctgcagaatagtttttgaatacacccacattttgtacgtttccatgtaagctgacatagtgttctgccatgtaatgtttatagctgctgatgtatgcacatttgggggtatatctatttctgaagaggtaagctgatcaaaataaatagagtgtaaattctttttaatgctttagtgattaaatgttttagtattttgaactgaaatggacacacaaacacacacacgcacacacagacccacagctttgaatgatcatgttgtggctgagcagccgctttttagacgttatcattttgcctcatgttggaggactttatggaatttaagaaatacattttgtgtgcatattgtttcatagcaagaattcgttgcaaaaatgctttatttttgaacaatgcttggaaatattatgtgacttttttgtttgtttgttttaggaggatggtgtatggtgggggcaataaatgaggttttttgcattccaaggaaatggcatatggattaactgtaagaaatgaaataagtaatttattgtaagacaacatcaagccatggaaacttggcagaagattcaaagcagcttaaacagcacttttaaattaactcctaagcgttacatggttgtgactatggaaactccagttaagacaggatcttatcagaggtggacaacgtgaagatttccttttccattttcaataaactttggaacaaccttctcgtatctcccctagagtttcgtgcccctctgaactgtctgttattgcaatgtagtttatcaacagaatttgtgtgttttcgatttaagctaaaagataatttaagaacatttatttccccttttcactttaaaaaattatgattattcctattattgttatgaaccttcttattttacatttgagggataaaggcaaatgatttgtgagtcttctagttactggaccgagttttctgctggatctggtgggaaggcagctcggtaaagtttccctcctgctccccccgcccgactttgactctgaatcagcatttggtcctattcagaggactcttaccacgacgtttctgttctacacttgggtggagaccagttgaccatagagcatttgcagagcctcattgtttgatttcttgtgactattctaagaatgaatgcaatcagattttaaaagtaactaaatatacttcagcacttttttgctttaaactagatcatcttagacttgtttataccttccagatttgattgttttactcccaatgactgcactatatgtatgcataagaccacttttgagcgctgtgttcccccttctgagtagtcctttgacgacgtgttgtgttttctgatgttgacttgagttccatttagtagcatctcttccttccatgtcttgatgttatgcaggaagtacagacgtactttaaatttttgttatgaaataaaaaaaagatgggttttgtaaaaataaaaaaaaaatatttttagcagaacaggacttacagggtcattgtccccacaatgtgccagtcgactatttgcacttaccttgtcctatatatccgtacggaggtgtgcaattcctcgtgtcagtagccttgtgacactgaacctggatggattatagaggagccctcacggctgatcaataatgttgcaaagggagactacagggatctcacgacgaatattctgatacaatactcaacctcggtatatatatatgtgtataaatatatgtatatcccagcggcactttatactgttcactgtacaaaagcttacagttttccacaaggactttaataactagctgggaaaagacgatgtaattatttcggggctctgcggaaccttctctgtacagcgccccctttctgttgtgctattggttgcagctgccatgctcagaatgcgttttgagagctgaagcaaggtgcttgcagtcacctgaggccgtccgtgtggcccagggccccagctgcctttagggcccccattgttcataacagcatatgcatttccccaccgcgttgtgtctgcagcttctttgccaatatagtaatgcttttagtagagtactagatagtatcagttttggattcttattgttatcacctatgtacaatggaaagggattttaagcacaaacctgctgctcatctaacgttggtacataatctcaaatcaaaagttatctgtgactattatatagggatcacaaaagtgtcacatattagaatgctgacctttcatatggattattgtgagtcatcagagtttattataacttattgttcatattcatttctaagttaatttaagtaatcatttattaagacagaattttgtataaactatttattgtgctctctgtggaactgaagtttgatttatttttgtactacacggcatgggtttgttgacactttaattttgctataaatgtgtggaatcacaagttgctgtgatacttcatttttaaattgtgaactttgtacaaattttgtcatgctggatgttaacacatcttactctaaataaacaaggtgttgccacatttgtagcacgaaggatctctaaaaaaaaaaaaaaaaaa

SEQ ID NO: 390 - DNA, 2898 bp, Artificial Sequence
  PRUNE1
tctgggcgtagagccccgcctccgccgctgggggcggggcgacgccggactccggagcgcccgcttacgcagttcctcccggggtcggaggccgattcgccgtgtggcgggttcgagtcccgcctcctgactctggcctctagtccctgagtcccgggcgggctgcattcgtcggggaaacctctcctcgaccaggggcacctctactcgaccaggggcgacggcgtactttgggcttcatcatggaggactacctgcagggttgtcgagctgctctgcaggagtcccgacctctacatgttgtgctgggaaatgaagcctgtgatttggactccacagtgtctgctcttgccctggctttttacctagcaaagaagtgacacagccctagaggaggcagtagcagaggtgctagaccatcgacccatcgagccgaaacactgccctccctgccatgtttcagttgagctggtggggtcctgtgctaccctggtgaccgagagaatcctgcagggggcaccagagatcttggacaggcaaactgcagcccttctgcatggaaccatcatcctggactgtgtcaacatggaccttaaaattggaaaggcaaccccaaaggacagcaaatatgtggagaaactagaggcccttttcccagacctacccaagagaaatgatatatttgattccctacaaaaggcaaagtttgatgtatcaggactgaccactgagcagatgctgagaaaagaccagaagactatctatagacaaggcgtcaaggtggccattagtgcaatatatatggatttggaggcctttctgcagaggtctaacctccttgcagatctccatgctttctgccaggctcacagctatgatgtcctggttgccatgactatctttttcaacactcacaatgagccagtgcggcagttggctattttctgtccccatgtggcactccaaacaacgatctgtgaagtcctggaacgctcccactctccacccctgaagctgacccctgcctcaagtacccaccctaacctccatgcctatcttcaaggcaacacccaggtctctcgaaagaaacttctgcccctgctccaggaagccctgtcagcatattttgactccatgaagatcccttcaggacagcctgagacagcagatgtgtccagggagcaagtggacaaggaattggacagggcaagtaactccctgatttctggcctgagtcaagatgaggaggaccctccgctgcccccgacgcccatgaacagcttggtggatgagtgccctctagatcaggggctgcctaaactctctgctgaggccgtcttcgagaagtgcagtcagatctcactgtcacagtctaccacagcctccctgtccaagaagtgactgttgagaggcgaggaggtagtgggtgaggctacctgactcacttcaaatgcatgttttgagatgtttggagattcagcaattctgtcttcattgctccaggatctggtatactgttctcataaaactgagaggagaaaaaaagtgaaagaaagcagctgctttaagaatggttttccaccttttccccctaatctctaccaatcagacacattttattatttaaatctgcacctctctctattttatttgccaggggcacgatgtgacatatctgcagtcccagcacagtgggacaaaaagaatttagaccccaaaagtgtcctcggcatggatcttgaacagaaccagtatctgtcatggaactgaacattcatcgatggtctccatgtattcatttattcacttgttcattcaagtatttattgaatacctgcctcaagctagagagaaaagagagtgcgctttggaaatttattccagttttcagcctacagcagattatcagctcggtgacttttctttctgccaccatttaggtgatggtgtttgattcagagatggctgaatttctattcttagcttattgtgactgtttcagatctagtttgggaacagattagaggccattgtcttctgtcctgatcaggtggcctggctgtttctttggatccctctgtcccagagccacccagaaccctgactcttgagaatcaagaaaacacccagaaaggccttaatgacctcataggcactcttccaaaaagacaacagaactggaatgagaggcctgggtctgtctcctgccttagcaggcctatcaatttcttgtcaatctctttttttccttgctcacattaaaaggaagcatggagttctaatgctcccataaactatgtattttggcaagacacttcactactccaggtctcactttccccatctgtaaaacagggtttggactaggtgttccctggtattctgtgatctgcctcttgctgccattctttctctcctctgcttctctgtatttttcttctgttatccctgggggtgctcaggttcacttgattgtctgtatttctgtgtggttgtagcaaggactcagcctcatgtagcacgaataggggtgtggttcatggcgtgttgacccagcagagcactccctcccactaacttgttctgcatgtgtagagtctccccattttttttaacgcaaccctttcccctttttcctaccccacagctctgttccatgtaagttgccaacagtttcactgaacagtggggtatgtgatggttttggcatgacatcttcagtatgagggggacagtttgacttcactttgagggtgtgatgtctgtagctatgtggaaggtaaaaatagtggtgtgatcatgaaccaaaggaatttatgttttgtaacttgggtactttattttgcattttgttatactattaaataattttttcctgttaaaaaaaaaaaaaaaaaa

SEQ ID NO: 391 - DNA, 891 bp, Artificial Sequence
  PRSS2
agacgggttctccaccagcaatcaggcacactctaccaccatgaatctacttctgatccttacctttgttgcagctgctgttgctgccccctttgatgatgatgacaagatcgttgggggctacatctgtgaggagaattctgtcccctaccaggtgtccttgaattctggctaccacttctgcggtggctccctcatcagcgaacagtgggtggtgtcagcaggtcactgctacaagtcggcaattaactcaaaattatcaggaagagggtgtgaatatcaccgcatccaggtgagactgggagagcacaacatcgaagtcctggaggggaatgaacagttcatcaatgcggccaagatcatccgccaccccaaatacaacagccggactctggacaatgacatcctgctgatcaagctctcctcacctgccgtcatcaattcccgcgtgtccgccatctctctgcccactgcccctccagctgctggcaccgagtccctcatctccggctggggcaacactctgagttctggtgccgactacccagacgagctgcagtgcctggatgctcctgtgctgagccaggctgagtgtgaagcctcctaccctggaaagattaccaacaacatgttctgtgtgggcttcctcgagggaggcaaggattcctgccagggtgattctggtggccctgtggtctccaatggagagctccaaggaattgtctcctggggctatggctgtgcccagaagaacaggcctggagtctacaccaaggtctacaactatgtggactggattaaggacaccatagctgccaacagctaaagcccctggtccctctgcagtctctataccaataaagtgaccctgctctcactgtcaaaaaaaaa

SEQ ID NO: 392 - DNA, 2117 bp, Artificial Sequence
  ARMC7
gcttccgccgggagcccggaaccgagcccaggagccggggacggtgcgccagtgccccctccgcgagccccaaccagtagacggttccctgtctcccgcgccccaatttcgattttcaaacgcaactcctacaggattctgagaccccgtcccatctcccatatcccatttccagctgcaaattactgcagaatctgaacccaggaaagaaacccatttgccgaccccctcttccctctccagacaggtggagagcgggtgagggtctcgctcggctttccccctgcacctttcccaccctcccgcccgtccctgggggtcctccgtcaccgcggccatggcccagaagccgaaggtggacccccacgtcgggcggctgggatacctgcaggcgctggtcacggaattccaggagacccaaagccaagacgccaaggagcaagtcctcgccaacctcgccaacttcgcttatgaccccagcaactacgagtatctgcggcagctgcaggaggcctgtgcaacctgtgcccagacagggccaacaaggagcacatcctgcacgcaggaggtgtcccactcatcatcaactgcctatccagccccaatgaggagacggtgctgtctgccatcaccacgctcatgcacctgagcccgccgggccgcagctttctcccagagctgaccgccacgcccgtggtgcagtgcatgcttcgcttctccctctcggccagcgccaggctccggaacctggcacagatcttcctggaggacttctgctccccccgccaggtggccgaggcccgcagccggcaggcgcactctgccctgggtatcccactgccgaggagcgtggccccacggcagcgctgatccatggagactgcgagaccgtggcacccctactgctggagaccacagtcctgatgtggacgcagggaacggggagcacatactgccccattggtgccttttcagccatctgaaaggcgggttctttcagcaggacaggcatttacactgatgaaacgccactgggagtgaggaagccagactccagagacacggagaagatcaaactggagctgcgttcataggctggcactctcaatcctacatcaggtgccaccaccaccagactcaggccctggtgtaagaagcggccaagtgcctggacccagaggctttgcaggacagtgttctcaggagctgggcctgaggcttaggagagctgccttcgctgcaggaaatcagggattatcccttaacagaagtgtctggagtagttttcaggtataggaatgagatgcctcgtggtgaaaggatctcaccctgggaagatgtggtgccccctccagggctctggaggatggatgcctcccccaggggctctccaagctgggcatttgggcctggtggatgccaacctggataacctgtggcccagcattgactgtccacccagccttgctgttaggcaccatgactccaagatgaagatgtggtccctgcccttgagtgacagcccagggacttaatgtggccatcgggcatcaagcacaaggccatgcaggtgatgatacgtcggaatagaggcaccagccctggtaactgcatcttctccccttgccaccccatggccccggctgaaagcttcggccctcctctgctgtcactcaatgatggggagccctaccccagaagtgtatcccacgagggcatcagggacgcagtgagtgttgctcaagggagtcaggaagagacggcaacgtaaaggatgtggctccatgtccatggtgccccctggtcaacataaggagcgtgggatccgatggaaaggtggagctcagggaaaatgggggtccttgcctctcgtgtaccccctcaaggctgaccccttagatggcccaggaatggcaggtgctacaaaaatggtacccacgtgggcatggaaatggggcagattaggggaccactggactcagaggggagggaagggctcatcagcacccgctcagggagcctgtccctttatgttcccaaataaagggtcctagaagactagaaagccaaggtcttttattaaaggtcccgactggtaaaaaaaaaaaaaaaaaaaa

SEQ ID NO: 393 - DNA, 2221 bp, Artificial Sequence
  LMOD3
aatatagatccggcaagagcttagctgtgatcactcctagctgctcagcaaaccactgaggttcctgggaaaaaaaaaaaaatatctcaaggtaaaataatatttagaaaaaataatgtcagagcacagcagaaattcagatcaagaagaacttctcgatgaggagattaatgaagatgaaatcttggccaacttgtctgctgaagaactgaaagaactgcagtcggaaatggaagtcatggcccctgaccccagccttcccgtgggaatgattcagaaagatcaaactgacaagccaccgacaggaaacttcaatcataaatctcttgttgattatatgtattgggaaaaggcatccaggcgcatgctggaagaggaacgagttcctgtcacctttgtgaaatccgaggaaaagactcaagaagagcatgaagaaatagaaaaacgtaataaaaatatggcccagtatttaaaagaaaagctcaataatgaaatagttgcaaataaaagagaatcaaagggcagcagcaatatccaagaaacagatgaagaagatgaagaagaagaagatgatgatgatgacgacgaaggagaagatgatggtgaagagagtgaagaaacgaacagagaagaggaaggcaaagcaaaggaacaaattagaaattgtgagaacaactgccagcaggtaactgacaaagcattcaaagaacagagagacagaccagaggcccaagaacaaagtgagaaaaaaatatcgaaattagatcctaagaagttagctctagacaccagctttttgaaggtaagtacaaggccttcaggaaaccagacagacctggatgggagcttgaggagagttaggaaaaatgatcctgacatgaaggaactcaacctgaacaacattgaaaacatccccaaagaaatgttactggactttgtcaatgcaatgaagaaaaacaagcacatcaaaacattcagtttagccaatgtgggtgcagatgagaatgtagcatttgccttggctaacatgttgcgtgaaaatagaagcatcaccactctcaacatcgagtccaatttcatcacaggtaaagggattgtggccatcatgaggtgtctccagtttaatgagacgctaactgagcttcggtttcacaatcagaggcacatgttgggtcaccatgctgaaatggaaatagccaggcttttgaaggcaaacaacactctcctgaagatgggctaccattttgagcttccgggtcccagaatggtggtcactaatctgctcaccaggaatcaggataaacaaaggcagaaacgacaggaagagcaaaaacagcagcaactcaaggaacagaagaagctgatagccatgttagagaatgggttggggctgccccctgggatgtgggagctgttgggaggacccaagccagattccagaatgcaggaattcttccagccaccgccacctcggcctcccaacccccaaaatgtcccctttagtcaacgcagtgaaatgatgaaaaagccatcgcaggccccgaagtacaggacagaccctgactccttccgggtggtgaagctgaagagaatccagcgcaaatctcggatgccggaagccagagaaccacccgagaaaaccaacctcaaagatgtcatcaaaacgctcaagccagtgccgagaaacaggccacccccattggtggaaatcactcccagagatcagctgctaaacgacattcgtcacagcagtgtcgcctatcttaaacctgtgcaactgccaaaagaactggcgtaagaggcaacagagccatctagaagaacaagaaatggaaatagtgactcttggattacagcatggagactatgtcagcagcaatactttaggatccacgtggcagaactggaaacaatgctaccatctgataagggtatttgtaaaaggcagaatgtttgggccatgaagaagtaggggctgaagaggaaggtggaaggagataaaatataatatttagaggcaatattttctacttgcaatcaatttgagtgactcaggtgaaatttagagtcatatttcccgaagcagaagttaaagaaaattttttaaacatttgctttattattgttttcttctggtaaataataaatataacagaagtgttaactattgtattcccatttttttctccttccatctcttctgcggtaattcatcacatag

SEQ ID NO: 394 - DNA, 4271 bp, Artificial Sequence
  STXBP6
gaggcctggggcgggtcgcgggtcccggcccccagcccccagcccctagccgctgctctttgccccgggccagggcgctcgggctcgcccacggcggcactgagcatgctcagaggcggccgcgcgggcaggtttgcttcgcaggcgctcgcactcggcggcgggcgggcgcgcggctgcagctggagctccagcgcccggagttggagttgccgggagtttccccccaacccctcccttttcgcgcgcggcagcaggagccggcgcgggagccgcgagcggcggcgagccagcacccgggccggctaagccttgtccggagcccggagccccgcgcggggcagccccccggggaggagcctcgtgctctgggacgcgtgccgcgcactggcacggcaggggcgcgagccaggctgcacgtttcctgtttagaaagttctgctccttcataaggaccttgaagtactaggaggaaaggtgctttgtgtgtggagttttccatgaagtgcagtcccaactaaaaggctgcgttaaagattcactgcgtgctgtcctcacttgttctacaatgagtgccaaatctgctatcagcaaggaaatttttgcacctcttgatgaaaggatgctgggagctgtccaagtcaagaggaggacaaagaaaaagattcctttcttggcaactggaggtcaaggcgaatatttaacttatatctgcctgtcagtgacaaacaagaaacccacacaggcgtccatcacaaaggtcaaacagtttgaaggctccacatcatttgttcggagatcacagtggatgctcgagcagcttcgccaggttaatggtatcgatcctaatggggattcggcagagtttgatttgttgtttgaaaatgcttttgaccagtgggtagccagcacagcgtcagaaaaatgcaccttcttccagatcctccaccatacctgccagaggtacctcacggacaggaagccagagtttattaactgccaatccaaaattatgggaggaaacagcatcctccattcagctgctgacagcgtgaccagcgcagtgcagaaggcaagccaggccttgaatgagcgtggagagcgattaggccgagcagaggagaagacagaagacctgaagaacagcgcccagcagtttgcagaaactgcgcacaagcttgccatgaagcacaaatgttgagaaactgcctatcctggtgactcttcttaagagaaactgaagagtttgttcagcagtttttacaagaattcgggacctccgcttgcttctttttttccaatatttggacacttagagtggtttttgttttttcttttcagatgttaatgtgaaagaaagggtgttgcatttttacatttccctaatgatcttgctaataaatgctacaatagcatcagcttcattttgggtttttgcctcctcccactgtgtgtatgtgtgtatatgtatgttttgaatatgttttctttattaaaaaatattttttgtagtttgaatatgaaatttggaccaaatgataaactgcgctgagtctaaactggcaacatgtatttttttctctgatattaagcaggaaggcattttaatgtggtgacatcagatgttatttttcctagatgaaaataaaagtcaagcagtgattagtttcactcactgtcctagctacacttaatttgaagattaaaattctacattgtggaaaacaattgaatttattgggaaaaacagcagtcttagattttgctccttgcatagtaatcttttgcatgaaccatcaccagcgttcaaaaaaaaaaaaaaatcagaatcgcagatagaaatctctttcctgagttacagtttaaatactcttgctacttgtatccagggtgtttacttggaattatcatatgaagggtaaaaatttgagagtaaagccctaaagaaaagcctacctaaaaccctctgtgtactcacagatgtttctcttgtcactgtcatagtgatggtcgctggtatggaaaagtgcttatatttttatcaaaaaattgatttgtccaggtaaaggtctgtgtcaatgataatgtgaacaagtagtacatttaaaatgtttgtcttgtctttttacagtcatgcctattttagagacaccttcataatgtccttgggagagggcctttagtttcttggtatctggattttggaggttttgatgttgtttttgctatctatttatttaatgtaatttaatatgtgagtttcttgacaaattgcatttcatggcaattgcaccttgcctggtctgatataaaacaccacaatcacaaacctttacattgcagtcagtttcaatacagttggtcacacacctcgtgattttctattactcaagataataaggggcttagggtctagaagttctgtttcctagagggttaaaatgctaaacataaaaaaagctgtgctttttttgtgaaactaggagacaagctgcacatctcagacacattgtaagcctaccactgcagcgcattgatttttaagctgcctgaatcttcaggacccctatctattccatcctatccattttgctgattgagtcgatatgtattgcagcctcttacataggagcataagatgacttttggattgttaatactgatttaaatagctgaagttctcctaataaagcattcccaaggagagagaaagtttgtctactgggggtaaaaatatcagatggtgcacattaaaagggagatgagatttgtcggagacagatttcagaatccttttagatgatccaattcaagaaaaccctctataaaatttaataaactgtataagttaactataatattttatactttctttttggtgtcttaaaaatttaaagaagcgaggaacatgccatttggtgagtaccgttggaagctattttaatttctaggaaaagccccaaatatcactccaaatagattttgtttgcagatctcagttcagaatgcacacacacacacacacacacacacacacacacacagagatgtatttatctttccaaattggattctggtttcagagatagagagttggtataaataattgaaaggataaatctaaaaccccctgacagtccgccaaattcaagaacagaagtggttgccaactctctaacaacaatgtttgggaagctgattccaaagtagctgaggatgaggtcataagcatactgtgaaacccaagattcttcttccctggtagaattacaatagttactcttgataaatataagtattccatgtcttgccctctttcctcactctctgcttatccttttagacctaagtttcattggaaatagcctgaattagaagaaagcccatccgaatctttattagccccctctaatgattagtttccaggctgcgttcatacctttgacctctcagtgtcaaagtcctacctaggcctccccacaacagagagggccgtaacagcaatccctgcccctcctttacctcccagcctcttgcagaggagcccagtgataacacatgtgaagttctttgctgtcctcttgtagaaggtgctgcagtgcaaagtattaatacggtcttagacaaaataactgtcatgatttgggaccagtttggttgagcttgtcagaagacatttcatttgtttcatttctgcacttctctatgaattttgggatactatatttctgtgaaggacttattgtatagacaactcaaaaaggaaagaaactttccagtattaccacttcttcctggaatatagctgtagtatttctcactagtattattagatacctgtgtacagaaagtatgcagttattcaggttaatgtttcatattaaagaatgtatttgtaaaatgtaacatgatcagtagttaccttttttcaagctctgaagaagttcagattacgtgttagacttaagttacagtgaaaactgttttaatactacttttgtggctagcaaaggttgtgcatctatttaaaattatttacaggatgctctaaataaggggcattaaagataggtttagctcttaattttagaaattgtgacactactgatgtctgtcatacagttattcttcagaagttctctgagatgtcaaatataatttttgtttaattcagagataagtaacacctgctctattgattcactattacaacaaaccctaattttgtcattaaatattttaactctgtgatgaaaaaaaaaaaaaaaaaa

SEQ ID NO: 395 - DNA, 3805 bp, Artificial Sequence
  HNRNPUL1
aggattccgtaccgtagggatcggagaccggaaactgctttctggagccgaagagagtcggaagaacaagaggttttccgtttgggttggggagggtctcgaaaatggggatcctagggtacggagctccgtgggcttggcggtcgtgctagcccagcgtgtgggctggggggtggggagccgtgtttccagggtggggaaggaatgtccaggtgtgcggggctgcgagagttctgaggaaggaggatcctggaatatgccgctggatgcgatcctgggcgttctcctatttggatgccatggacaatattaccaggcagaaccaattctacgatacccaagtcatcaaacaagaaaacgagtcaggctacgagaggagaccactggaaatggagcagcagcaggcctatcgtccagaaatgaagacagagatgaagcaaggagcacccaccagcttcctcccgcctgaagcttctcaactcaagccagacaggcagcaattccagagtcgaaagaggccttatgaagaaaaccggggacgggggtactttgagcaccgagaggataggaggggccgctctcctcagcctcctgctgaagaggatgaagatgactttgatgatacccttgttgctattgacacctataactgcgacctccacttcaaggtggcccgagatcggagtagtggctatccgctcacaattgagggctttgcatacctgtggtcaggagcccgtgccagctatggggtcagaaggggccgtgtatgcttcgagatgaagatcaatgaggaaatctccgtgaagcaccttccgtctacagagcctgacccccacgtggtccgtatcggctggtccctggactcctgcagcacccagctaggcgaagagcctttctcctatggctatggaggcactgggaagaagtccaccaatagccggtttgaaaactacggagacaagtttgcagagaacgatgtgattggctgctttgcggattttgaatgtggaaatgacgtggaactgtcttttaccaagaatggaaagtggatgggcattgctttccgaatccagaaggaagccttggggggtcaggccctctatcctcatgtcctggtgaagaattgcgcagtggagttcaacttcggacagagagcagagccctactgttctgtcctcccggggtttaccttcatccagcaccttccccttagtgagcgtatccggggcaccgttggaccaaagagcaaggcagaatgtgagattctgatgatggtgggcctgcctgctgctggcaagaccacatgggccatcaaacatgcagcctccaacccttccaagaagtacaacatcctgggtaccaatgccatcatggataagatgcgggtgatgggcctacgccggcagcggaactatgctggccgctgggatgtcctgatccagcaggccacccagtgcctcaaccgcctcatccagattgctgcccgcaagaaacgcaactatatcctagatcagacaaatgtttatgggtcagcccagagacgaaaaatgagaccatttgaaggcttccagcgcaaagctattgtaatttgtcccactgacgaggacctaaaagaccgaacaataaagcgaaccgacgaggaagggaaggatgtcccagatcatgcggtcttagaaatgaaagccaacttcacgttgccagatgttggggacttcctggatgaggttctgttcattgagctgcagcgggaggaagcggacaagctagtgaggcagtacaacgaggaaggccgcaaggctgggccaccccctgaaaagcgctttgacaaccgaggtggtggtggcttccggggccgcgggggtggtggtggcttccagcgctatgaaaaccgaggaccccctggaggcaaccgtggcggcttccagaaccgagggggaggcagcggtggaggaggcaactaccgaggaggtttcaaccgcagcggaggtggtggctatagccagaaccgctggggtaacaacaaccgggataacaacaactccaacaacagaggcagctacaaccgggctccccagcaacagccgccaccacagcagcctccgccaccacagccaccaccccagcagccaccgccaccacccagctacagccctgctcggaaccccccaggggccagcacctacaataagaacagcaacatccctggctcaagcgccaataccagcacccccaccgtcagcagctacagccctccacagccgagttacagccagccaccctacaaccagggaggttacagccagggctacacagccccaccgcctccacctccaccaccacctgcctacaactatgggagctacggcggttacaacccggccccctataccccaccgccaccccccaccgcacagacctaccctcagcccagctataaccagtatcagcagtatgcccagcagtggaaccagtactatcagaaccagggccagtggccgccatactacgggaactacgactacgggagctactccgggaacacacagggtggcacaagtacacagtagccagtgtgacccagaggctcccggaggcccctgccggcttcctccaccagcgcctgcctcggcccctcctctgcccccgccagatcccgtggtgctggggatggggtcatcccagggctgcctccctccagcccactgcctcccctctgaggggcttccttcccctccatagggccaggcatttttttctggattcaaacaggcaacaatgaccttttattttctgtttgtccccacctccccagccttccacctcctgttcttcctaccttcttcctttttgactaaataatccccacctcccttgatcatacagtgaggctacagtgactgaggggagaatcccctcctgttcactctcccaaccctgctccagcccctcagcttcccagaccctcatgcagttggttgtaaattctcccaggagctgttttactgtctacttttcaggattaaaaaaaaaatcaaaacttaaaaaaaaaaaagtttaaaaagcaaaatggggagggggaggaagcagtgacttttttttggtaattatgcgcttttttttaatttttagaatttgtctttttactgtgggtgggctgttgatatttcatcaagataagcatttctttcctgagttcaggtgactgaggaagagccacaaaacaaaacacaacaaaaccaaaccacagaatcatctttaacccaactttttatacgatgccccagttccccataactttgcacacaagcttctgtgttcagttgaattgtaactgctttttgtatttggagagagtgactattgaacttgaaaccttttattccgggcgtcttggtagtttctggtgggattcagtgggtgagagggaagaaggggaggttggggggctccttcccttcagaacttgaagtttctcccactgcctcctctccagtggtctcccaggtgccagacccaaaagcttttcctacagtgataccctttatttttacttccccttgactcatatgttttaacatgattttaacaaactgcacttattaagaaatgtgtttgccctgttttgtttggtttcgttttgttttctttgaataaatgacatggcacctcctagcaggaaggaagcagggttgaaaccctgaagtgttactgcagttggccgttaattggggtgggggcctctttaaagggaaattatttactcattcattaaacaacttaactgaaaaaaaaaaaaaaaaaa

SEQ ID NO: 396 - DNA, 11326 bp, Artificial Sequence
  RNF217
atgggcgaggagcagagcacggtgagcggcggcggcgggccccaggagtcgcagaccctggccagtggcactgcgggccaccctgagcccccgaggcctcagggggacagcgcccgggcgcccccgctgcgcgccgcctccgcggagccgagcggcggtggctgcggaagcgactggggctgcgcggacaccagcgccccagagcccgcgaggagcctggggcccccgggctggagtaagagccgagcaccggcgcagcctgcgggactggcactcaccgggcctctcaatccccagaccttgccactgcagttggagctggaggaggaagaggaggaagctggggatcgaaaagagggaggggatgaacagcaggaggcgccccccggcgaagagctggagcccaggacccgcgtgggggccgccgacggactggtcctggacgtgctgggtcagcggcgcccgtccctcgccaagagacaagtcttctgctccgtgtactgcgtggagagcgacctgcccgaggcccccgcctcggagcagctctcgccgcccgcgtcgccacctggggctccgccagtgttgaaccctcccagcacccgctcttccttccccagcccccgactgtccctcccaacggattccctctcccccgacggcggcagcatcgagctggagttctacctggcgcccgagccgttctccatgcccagcctgttgggagctccaccctactctggcctgggcggtgtaggggatccctatgtgcccctcatggtgctgatgtgccgggtgtgcctggaagacaagcccatcaagcccctgccttgctgcaagaaggccgtgtgcgaggagtgcctcaaagtctacctgagcgcccaggtacaacttggccaagtagaaatcaaatgccccatcacagagtgttttgaattcttggaagaaacaactgttgtctataacttaacgcatgaagactccatcaagtataagtacttcttggaacttggccgtattgattccagcaccaagccatgtcctcagtgcaagcactttacaaccttcaagaaaaaaggacatattcccaccccttccagatcagaaagcaaatacaaaatccagtgccctacctgccaattcgtctggtgttttaagtgccactctccttggcatgaaggtgttaactgcaaggagtacaaaaaaggagacaaattgttgcgtcactgggccagcgaaattgagcatgggcagaggaatgcccagaagtgtccaaagtgcaagatccacatccagcgaactgaaggatgtgaccatatgacctgctcacaatgtaacactaatttttgttaccgatgtggtgagagataccgccagctccgattttttggagaccacacatcaaacctcagtatatttggatgcaaatatcgctacctcccagagagacctcatttaaggagattagtgcgagggtcagtctgtgctggaaaattattcattgcacctctaattatggttttgggattggcactaggggccatagcggttgtaatcggtttatttgtatttcctatctattgcctttgtaaaaaacagagaaaacgatcacggacaggtatgcactggtaacatgcagatgatttcatccagctaagctggttggagtaggagcgataccaaagggtacacccatctgtgagtcacatcttgaaaaacactgagaggaaccttctaccatctcatctcccagtgattctccgtgggccacaatgcctctagctatggtgcactcccaacatggtatcctgtcctttccctaaacaaattgctgctgcttttaaaaaatggtcactttcataaactataaacatctatatcataactctgacctttgtggttcttggaagaagatattttaagaaccagttatcctaagaattctgagcacgcctcttctgagaattgcttggactgtctttgaactctgcacctccttccaggccatcttgtgagacttggtgttaatagctgaagtcctatctgtaccaacaagcaaggccacttttcagaagataagagttcactgaatgcacctattataatctgtggccccagcagtataattcttttatctttcaaatgttataattgcaaaaaatctcaatgtccaaaagggaatgagtgaaactaaattaatgagaagaatattaagttactgaagtgtatatgcgtaggggcgtgaatgtgtgtgtatataaatatgtattaaaactaggcccagtaaccttgtacttacccagttccatgccgctacactatttttccacattttcatagacctattgaaagatgatggctcctttgtggacataatttagcaatgtattaaattaaagtcaatgtagacaacaggccatttcgatactgaacttttctatttcttgctctttctttttgtcacacaaacacagaaatttgtgcaacgtcaccccaaggagtattaagctttgtaaactgacaaaactggctgcttttaggaaattctcaagacacaaatattcagtctttttaaaattcttacattttggaaaacatgcttcactctatagatagatccttcacattgggattatttaatcccaaaaacaagtttgctgtagacaactgcttaagcctttaaaaaattcctattctgctaattttttaaccaacttgtaattatagataattctgctttaggtcaaggtcttacatcatttaatatcctaaccttgttatctcttgcctcctcctctctgtttttatttgttttcaaggtttttcataaaaacaaatactagttttgaaggattttttcttacatttaactgctcaaacataatatttttggggacaccttcttatggaggagtttgaaaactttttatgttcttgagtttgtccaatatcagctgcttttgggaaaggaaacaaaaaagtgaaggaaatattttcaggaagtttttctcaacctacaaaagctttaaaaataagaaattgacaagtaactagactatgatatgcctttgctttcatcacaaaagttcatcagcaaacaggaaaaaaaaagacccctaaaaagcctaaagctttaaattgtctccaaattcttaaaattagtcatctgtcttagatgtacatttatttgtcagcaaccttgtctgatttgaaatagatgatatgataaaacatgcattaacatgagtagtttatttttgttgggctccagagtgtaagaatattttattttttgtttgacataaaaagtgaagttgacttgcgtgaataacaatccagcatgctttcattctttctgaataacacagaataactgtgctacagcttctggattagttgtctatttccagttagaggagtgtgtgacatttatggtttgggaatagcatatttctaaagcataatataatacaagaaatagtgatgctctgttttcacaaatttatcttttcattcacccatccatccatttaacagatatttattgagtgcctatcttaggtgtaatagtatttaagactgaaagaaggagaatttctaacctgtcataagagtaaggtttcgtaaattcatctttcctgaacttaggcattagtttggcaatatgtgaatatgatgaactctaaacctagctgatctgtatatgtatgatgtatatatgtcatatgtatgatatatatgaaatattcccataactgcatatgaacacatatgccatatacatatataccaacgggctgaataacatactcttttgtcttggataatctgttttctgggttatgtatctgttgtctttggcctactcagggatttttatttctttaaataacttatcttttggacatatttttatattatttggaaaactttccaatattcctgttacaaagtggtgtctgttttcagtgatggctatttcatcagtgcttgaaatagtgtgcactgtgttgcacaggtttttcatttttctattgagtagatatttttaaattaacatacacatttttctctttaaagggtcatatctattaggcctttccctgctggtaacttaaaatgattatttgtgaattttttactaagtttcatcaagatcttaaaaagagagaagaaaataaaaagtattatttatatgtcagtgccaactttgaaggtaaaacagtagtagtaacttttgggagaaattctaaaaactactttaaaaagaagcgtgcacataaaataaatatctttctatccaaggcttgtcattttatatgcttttattgtaaatttaatatatactactttaaaaaattgaactatacagaatttataaaatacaactttctctacttaccccacctcttattttctaggggtaaccactgttaatggtttggtatgtgtccttccagacactttctacaaatatacaaataagtgtgtttgtgtatgtgtctgtgtgtgtattcattttatacaaatagaaaaatattcttactgtgctgtgactctttgtcattttattatatattaatagatacctttccataagcgtttaaatagatttacctcattcttttataaattactgcataatccattgtaggagtatactttaacttattgaattagtcccctgttgaatggactacaagattattttcacttctctattacaaagaaagcaagagtgaagacccttttgcatatatttttgtcaccttgcatgaacatatccataaggttgtacatttgttttttacaagatctttgtaataaacattttaatgtaatttcaggagatgaggtcatagagataatatgagacccttttttggataaaaagaaagattgtacaggagtgcataatttttaaagaaaatcgtcttttgaagggtaatttcctttctgcctgattagccaaataaataccttgccaaaacttacaataggaaattttttttcaataaaaataaaatttgaggagatgtgtgtcagataatgtgagagagatgaattgacttttggattgcctcattttaaaacttgagggatttaaatcaaatacccaagccaaattggtgatacttttcgcatttttagtaacactatccacttttgtgtatgttgcttgacagaggaacttaattatgccattgtgaaaagtaggaaagaatatgttggcaattataaatgcccacagcaattcccagaaaaatacattagattatgtacgatttagtgatttggtgggataattataaatcgtggaataatttatatatgtggagtaagaagagaggggtcaaaccttttggtacaagcaacatcttgttgccaccaccttgattttctcataggtgctattgtgtcctaagagtagaacagacaagaaaacaaagataattaaacacaagtcaggttacaacatgatatctttaattgtactttctctgctgtggtatcaagattcagtggtgcttgtcagaaaataccttgttctgtgactctgactatctcttgagtcccaaggctccaattgagcctttatctttcaaccttaccacccaagtatatgaccaactgttctcctaaaatacctatgaaccactgtaatcatttccagtccctgatgcccctcttcaacctcatttttctccatacctctgctattctaactattcctcttcactgaaggagaagaggagagacaggaggggcctaaaaactcactctggtatgtgggaaacattagaattccttcctgacctttgtcaaatgagggcacatctgccaagacatcagtccagcttctcccttgttaaatgaaattgtttttaacattacacttttatactggctgttacattagaattacaaaaaagttagtggcctctataaccttaattggcatactttactacaaaaataagaaaatgtatgccaaaaaacgtttttagattttaattttataagcaacctgcacataagccttaatgtgagtcttcacattggattatatttttattctcccatatttgtggctgaaatctctcccaactattgagagtgatctttcccatggtctgctttattgttttgtgttaatatctattataaatatagccttaaaattttgtaatgcactttaaaatatttgtgccatttaaataatgacaaagcaatcaatgcatacatttcaatggagacagtatacaaagttaaagcaactgatacatatatttcagtggagacagtaggataacagtgttagcaaatatgtgtcatctctttaaatttgggaggaatcagaagctaaagatttaaaacaaataaaacatacctgaagaaaagtagcaatttctgaaattgtagtaatcttggaatggttatcaaacctagcaaataatacttaataagtgttacctaatatacctaattggaatgtttgtttaaaatattaaattaatttatactgaaagttttaactgcaatttcataattcatgaattctataaaagaaatctccctcactaaaaatatgatcaatcaaaactaccagttttgcacaccaatcccaagtttaagcatattttgtatttaaagttataatttaattatgatactgtccccctaatatggaaaataagttacaaaattcttttttttttttttttttttttgagacagaggttctctcaatgttgcccaggctggtctcaaactcttgggctcaagcgatcctccctcctctgcctctggagtagctgggattacaagcacgtgcctactatgcctgtcttcaaaatcacattgttaatttttatagccacaattattaatttgataaaacaaataattttatagaagcattaaagtattatcagaacaaaatcagagttccaaaatttggggagtattttaagattgtgaaatgttaccttttggatgcaaaccaatgatacaaatctttaagaaagaattacagtgggactcctttgaaactctgattttgaaaatagaacaaatacacatttcatagccaaactttgtgtgggacttctattgttactaattgtaaggctgtaactttggttgacttcatccaaatccaagaaacagagtcacagtagtgagactattctcattgcttctttggagcattagctgaagctttaccatatcacataccttacaaaatccctatacatattgccagttttaaaagaatgtaattatgcatgttacaaactatatatatctttttggctagagaagtgactattttagaataacagtatgaatgtaaaaggcaataattttttttaaatacacaaaacattgccattgcccttttttgtcacttccttttttcttctaaaaattttcatttggtgtatctaactttgtatcacttaaattattcagacttactaagataaaaaatactttttttcagttctgtgctatattctgtcactctattccattattaatactaaatgactttccttgtgaaatgatacccacatactacaacatcaagctcctttttctcttaaatttcctaattatcttgatttttgcctctgcagtcttcttcccatcttggccaagtgtgggataaattctgtctcgcccgtaactcctttcactgtaatgaaatgaattcaacactgaacgcactccagaatttagctctggtagtgagcataatttaccttggcttattttatttgtaaatggaaatgtatcaggagtgcctggaacacttttccctcttgataggagttggagaacactgcctagccctctgccaagaagtaagtcaagcaaatgaagataccagttggatcagagggcctaataatagtctaaaaccaagcttcagaaattgcttcgtgactgttgtaagatcaatattgtgtttgcgtattagttggacagaaagcatgtgtggacattcatccaacctgaccccaggtcattcattctccatccaaaaagggttataggtatggtttatggtctttgtttcagcaaaacgtcctacagcttggacttggggtggatttatatagtgtagcatttgtatataagattcaattatggattcatgctctgtgaacattgttagatttttaataatctaaagtaggtcacattgaatgtaactgatattaaccctattctagagaaaacatttgtcatttgcaagtgtttgacttttttattgatatgatttagatatgccacactcaatatatttagtatagattcagtacataacaggaaagaaaaagggagagacagacttgagtgttaaaggaccccagaaattgctgaaatgtccttttagattcttgtggctggcaagctatgctgtcattggttctctgcgaatctgtgatgtgttcacttcgccatgccccagcttgggaaatattcttagtaatccaatcaaatccttaaaaacagcatttttgtgaatgtattacttcttcaatatccccatatatttgtattgtttcaagccactagtatctaaatttttgatataaatatctaaattctttcattttatagaaaattagcatgctttatgtttctttataatgaaaagtctagataaagtatcataatttcattatcagctgacaagaaacccttctaagacccatttttttaagtgtcatatggcaactcctcaatagcttacttttattatttgatcattttcatcacaattgcaatcctctagagggtattttaaaaagtagaccaaccttatgtttcacgtgaaacatagaataataattagtttgtatatatataaaaccatttaccttgacaaggacaatctgttacagatttttaatatgaaaattgacaattttgttgcttttagaagcaattaacatagtaattagtaaattctgagagatgacagaaatgattttctgtagaaggaacacaacagtgatgttaaaatgttaacaaagaaccagttgttttgattctattttaaacaaaattgtaaggcaattttatgaaacaaacatttatatcaatgtatatctatttcaaaactgtgggacaattattcattcttttcccaaatagagtaaaatattaaagagaaaaaaattcgagtgtttatctgttattactgtatattcagaaattacagttctaaggaattattgtcatcctctaagtatcagaatgtattccattttaattatattctccttaacaatagaaaattagaagaaatttcttgatcataagatgaatagtaatttgtaccagatcttgtccatcatttcattagattgcatatttttagttttctataaaatttgcagccattttccaaataaagtaagttataatatttttcaagtttaaaatggaccgggttgaaaagagatttcattgattctttttaatgatattggaaaatatttatgcaattttattttttaaccttttctccatttcattagttatactattaactttgataatcacaaaactatgtggaagaaatcattctgattatattttatgaaagagaggggtagagtaaattttttaattagacaatgttgatatgcagaaatctctcaaaagaaattgcaaaggaaaaattacgttgagatgaaatgttgagaaataaggagtatcttaaaaacctaatttcttacactttttagagcaatcaacttatttccaaattattatttcatgctgttgtttccatgaattgtgtttttagcatagtatatacttttctaccacgttagcatttacactctaattactgaaaataaaggaagaagttggtgaataaaagccagggaaactgggtttattctcattttccaatagcactaatgtataatccctttaaccttccatatggtgctttgtgtgatgagtatataacattcatatacgttattagtgccttatttttttcacttgactttatttcttatctaaagagccatatattttttgtgagtgttctttggtccctctatttaaagtgctaaggagaaagcatatctttagggatgtatataggctgcgtttgctaccttaatctactgtattatctctaaaacaggttagccaatgtatttttcttaaattcattgttcatttttaagctaacctatacaaatggatattaaacaccagaaattaaagccattaaaattgaattgtactttaaaaccataaaaaatgctaattaagtttagaacaggagttgaaatgactctcagttttatctatagctccaattaggacaaaattactttacaaaaagcattaaaaataaaagtaactgtatggtacttcaggaatttgaccagttccttacaacttattcttggcaatattttgtcagtaatatactttcatacagatgctagagaaccatggtgtctgctatttacatgttatttgttcccagtgagctttatcaacatcaaccctgtttatataatatgttattttgctcttcttgatctgtgccttttgttttagctttatacaaaatgctaggtttgttatattctttatgtatcataatatataattcaacttttcctgatgaatgtatgctgaataattaaactaaaccatgtgcttagaaaagacaaagacaggttgtatatgcagttatgtgtaaatatttgacaaagaaaaaaaaaggaaaagaatcttcctgccaacaggtaggtcctgctggacaggacctgaaaattaagagatttttttttttaagcagtgaaatttaaaaatctattacctcaagaattttcagtcgatatgtcaatgtactgttccttctcagtaagtacagtgtcacatgctgctggcggtaaaagcaacccaagtgtcagatcacacaaattttagggacaagtctttcaaaagacggacaccttgtgatattttggagtctaatttccgacttttcgtaatgtcccaatgaccttttgttgtggttgggcttttataaaaaattattttcggttggttgttgtagaatggaagagtaatcttaattatgaaatcagattgcatggaagaatataaagacactcactcggatgaaaactataacggttttcaaactattttgatggtcattgtacgagctattgtatggattactgtggagtgctgtttaccacatgatgtgtgcaatacatcatgcaatgttatttagcaatgcgtaataaaagtttttaaaagagaaaat

SEQ ID NO: 397 - DNA, 4941 bp, Artificial Sequence
  FILIP1
gataacccagctgcttaggaactgagtaaagccggctccaaacttctcagctgttgacaggcttgacttgctgagaacactggttaaatatagcacccgcgagctcagctcctcaacatagccattgctctgacagtgttgtgaagggagcagaagaggagaaacctaatctccgaacccaacaacacctagcaacagtagaaaaaacttttaaacaaaagtctgggtgggagatatacaacaacttccaatttctgctgatcgggatttcagggagaagaagctgctttccctcctctctactctgtttcctgcatgacttcagctattggctggtcctgggaaagaaagtgggaaaagctttttcctctgtattcttttgggctggatagtttttgagaactcgaatctgtcttgggctgtgagacaagccactgggttcttcaaaggataaactacctacatagaggacatacctttggttaaaggagctgccgtcaggttcttcgcagagcctccagtaaagaacgcatccctgaaacaccttgattttatcattgagagaccctaagcagaagaaacaattaagccacgctgtatctggacttctgatctgcagaaactgtgagataataaatggatgttgttttaagccttgaaatttatggtgggaatgagatctcgaaaccaaggtggtgaaagtgcatctgatgggcatatctcctgtcccaagccctccatcatcggcaatgctggtgaaaaaagtctctcagaagatgcaaaaaagaagaagaaatcaaataggaaggaggatgatgtcatggcctcaggaactgtcaaacgacacctaaaaacatctggagaatgtgaacgaaaaactaagaaatccctggagttatccaaagaagacctcatccaactactcagtataatggaaggggagttgcaggccagagaagatgtgatccacatgctgaagacagagaaaaccaagcctgaggttctggaggctcattacgggtctgcggagccagagaaagtgctgcgggtcctgcaccgagatgccattcttgcccaggagaaatccataggagaagatgtctatgagaaaccgatttcagagctggacagacttgaggaaaaacagaaagaaacctaccggcgcatgctagagcagctgttgctggccgagaagtgtcataggcgcaccgtatacgagttagagaacgagaagcataaacacactgactacatgaacaagagcgacgacttcaccaacctgctggagcaggagcgggagaggttaaaaaagctccttgaacaagaaaaggcttatcaagcccgcaaagaaaaggaaaatgctaaacgactcaataaactaagagatgagcttgttaaactcaaatcctttgcactcatgctggtggatgaaagacaaatgcacattgaacaacttggcctgcaaagccagaaagtacaggatcttactcagaagctgagggaagaagaagagaagctcaaagccattacttccaaatccaaagaagacagacagaaattgctcaagttagaagtggactttgaacacaaggcttcgaggttttctcaagagcatgaagagatgaacgctaaactggctaatcaagagtctcacaataggcaacttagactcaagctggttggcttaacccaaagaatcgaggagctagaagagaccaacaaaaatctgcagaaggcagaggaagaacttcaagaattaagagataaaattgccaaaggagaatgtggaaactctagcctcatggcagaagtggaaaatcttcgaaagcgtgtgcttgaaatggaaggtaaagatgaggagatcactaaaactgaatcccagtgtagggaattgaggaagaagctgcaagaggaagaacaccatagtaaggagctcagacttgaagttgagaagctacagaagagaatgtctgaactagagaaattggaagaagcatttagcaagagtaaatctgagtgcacccagctacatttaaatctggagaaagaaaagaacttaaccaaagacctgctaaatgaattggaggtggtcaagagtcgagttaaagaattggaatgttctgaaagtagattggaaaaggctgaattaagcctaaaagatgatcttaccaagttgaagtcatttaccgtgatgctggttgatgaaaggaaaaatatgatggaaaaaataaaacaagaagagagaaaagtggatggactcaataaaaattttaaggtggaacaaggaaaagttatggatgtaactgaaaaactaattgaagaaagtaagaaacttttaaaactaaaatctgaaatggaggaaaaagtatacaacttgacaagagaaagagatgagttgataggcaaattgaaaagtgaagaagaaaaatcctctgaattaagctgcagtgttgacttactaaagaagagacttgatggtatagaggaagtggaaagagaaataacaagaggaaggtcacgaaaagggtctgagctcacctgcccggaagataataagattaaggaactaacacttgaaattgagagactgaagaaacgtctccaacaattggaagtggtcgaaggggatttgatgaagacagaagatgagtatgatcagctggaacagaaatttagaactgagcaggataaggctaacttcctctctcaacaactagaggagatcaagcaccaaattgccaagaataaagcaatagagaagggtgaggttgtgagccaggaagctgaactgagacacagatttcggttggaagaagctaaaagtcgagacttaaaagccgaagtacaagctcttaaagagaagattcacgaattaatgaacaaagaagatcagctttctcagctccaggtagattattctgtacttcaacaaagatttatggaagaagaaaataagaacaaaaacatggggcaggaggttctcaatctgaccaaagagttggagctttccaagcgctacagcagagctcttaggcccagtgtgaatggaagaagaatggtggatgttcctgtgacgtcaactggagtccaaactgatgcagtcagcggtgaagcagcagaggaagaaacgccagctgtattcatacggaaatccttccaggaagaaaatcatattatgagtaatcttcggcaggtgggattgaagaaacccgtggaaagatcttctgttctagacaggtatcctccagcagcaaatgagctcactatgagaaagtcttggattccatggatgagaaagagggaaaacggcccctccatcactcaggagaaagggccccgaacaaattccagtccagggcacccaggagaggtagtcctttcaccaaagcagggccagcccctgcatattcgagtgacaccagaccacgagaacagcactgcgactttggagataacaagcccgacatctgaagaatttttttctagtaccactgtcattcctaccttagggaatcagaaaccaagaataaccattattccatcaccaaacgttatgcctcaaaaacaaaaaagtggagatactactcttggcccagaacgagccatgtccccagtcacaattactacattttccagagagaagactccagaaagtggaagaggcgcatttgcagacaggcccacatcccctattcagataatgacggtgtctacatcagcagcaccagctgagattgcagtttctcccgaatcccaggaaatgcccatgggacggacaatcctcaaagtcaccccagaaaaacagactgttccaactccagtacggaaatacaactccaatgccaatatcataaccacagaggacaataaaattcacattcacttagggtctcagtttaaacggtcccctgggacttcaggtgaaggagtcagtccagttattactgtccgaccagtaaacgtgacagccgaaaaggaggtttccaccggcactgtccttcgctctcccaggaatcacctctcctcacggcctggtgcaagcaaagtgacgagcactatcaccataacaccggtcacaacgtcatctgctcgaggaacccagtcagtgtcaggacaagacgggtcatcccagcggcctacacccacccgcattcctatgtcaaaaggtatgaaagcaggaaagccagtagtggcagccccaggagcaggaaatctgaccaaattcgagcctcgagctgagactcagtctatgaaaatagagctgaagaaatctgcagccagcagcaccacctctctcggaggggggaagggctgagggcagtggctaagggggtatgttgtgcagatgctactgctgccgtgaaagtgaaccttcatctgtttgtgccagttctttacatgtactaatttaagttttaaatattgtgtttataaaataaccaactaataaccatttgtctttcccattttgtgcatttgttttgatgctggggaacaaaattagcaaaactattgcttgctgcctagaagccagggcgtggtttctagttccagttttgcttctagcaagtggacccatcaatagacccatctgagcctgtttcctcatcagttagatgtggggactcaatcacacgctcttcaagtccggctcccatatttcctaattgcaagccaaatttaatgtaccttgttccacaataattttttattaaaaaaatcctattacaaaataagacatactttaactattgtcatttgcctctttcacatcatgaatttgctttatgtgctggaaaaaacatcacatagctatcacagggcctggacctctaaaattttgcaaaaacaaaaggttctaagatgatttcaggaaataatgtgaacatgtaataaaatggaaatgaaatatggaatcctaaaaaaaaaaaaaaaaaaaaa

SEQ ID NO: 398 - DNA, 2270 bp, Artificial Sequence
  CRISP3
gcacaaccagaatttgccaaaacaggaaataggtgtttcatatatacggctctaaccttctctctctgcaccttccttctgtcaatagatgaaacaaatacttcatcctgctctggaaaccactgatccctgttccaccggttttgttttcccagcaatgacattattcccagtgctgttgttcctggttgctgggctgcttccatcttttccagcaaatgaagataaggatcccgcttttactgctttgttaaccacccaaacacaagtgcaaagggagattgtgaataagcacaatgaactgaggagagcagtatctccccctgccagaaacatgctgaagatggaatggaacaaagaggctgcagcaaatgcccaaaagtgggcaaaccagtgcaattacagacacagtaacccaaaggatcgaatgacaagtctaaaatgtggtgagaatctctacatgtcaagtgcctccagctcatggtcacaagcaatccaaagctggtttgatgagtacaatgattttgactttggtgtagggccaaagactcccaacgcagtggttggacattatacacaggttgtttggtactcttcatacctcgttggatgtggaaatgcctactgtcccaatcaaaaagttctaaaatactactatgtttgccaatattgtcctgctggtaattgggctaatagactatatgtcccttatgaacaaggagcaccttgtgccagttgcccagataactgtgacgatggactatgcaccaatggttgcaagtacgaagatctctatagtaactgtaaaagtttgaagctcacattaacctgtaaacatcagttggtcagggacagttgcaaggcctcctgcaattgttcaaacagcatttattaaatacgcattacacaccgagtagggctatgtagagaggagtcagattatctacttagatttggcatctacttagatttaacatatactagctgagaaattgtaggcatgtttgatacacatttgatttcaaatgtttttcttctggatctgctttttattttacaaaaatatttttcatacaaatggttaaaaagaaacaaaatctataacaacaactttggatttttatatataaactttgtgatttaaatttactgaatttaattagggtgaaaattttgaaagttgtattctcatatgactaagttcactaaaaccctggattgaaagtgaaaattatgttcctagaacaaaatgtacaaaaagaacaatataattttcacatgaacccttggctgtagttgcctttcctagctccactctaaggctaagcatcttcaaagacgttttcccatatgctgtcttaattcttttcactcattcacccttcttcccaatcatctggctggcatcctcacaattgagttgaagctgttcctcctaaaacaatcctgacttttattttgccaaaatcaatacaatcctttgaattttttatctgcataaattttacagtagaatatgatcaaaccttcatttttaaacctctcttctctttgacaaaacttccttaaaaaagaatacaagataatataggtaaataccctccactcaaggaggtagaactcagtcctctcccttgtgagtcttcactaaaatcagtgactcacttccaaagagtggagtatggaaagggaaacatagtaactttacaggggagaaaaatgacaaatgacgtcttcaccaagtgatcaaaattaacgtcaccagtgataagtcattcagatttgttctagataatctttctaaaaattcataatcccaatctaattatgagctaaaacatccagcaaactcaagttgaaggacattctacaaaatatccctggggtattttagagtattcctcaaaactgtaaaaatcatggaaaataagggaatcctgagaaacaatcacagaccacatgagactaaggagacatgtgagccaaatgcaatgtgcttcttggatcagatcctggaacagaaaaagatcagtaatgaaaaaactgatgaagtctgaatagaatctggagtatttttaacagtagtgttgatttcttaatcttgataaatatagcagggtaatgtaagatgataacgttagagaaactgaaactgggtgagggctatctaggaattctctgtactatcttaccaaattttcggtaagtctaagaaagcaatgcaaaataaaaagtgtcttgaaaaaaaaaaaaaaaaaaaaaaaaaaaaa

SEQ ID NO: 399 - DNA, 2371 bp, Artificial Sequence
  RGS7
gtcgcgcgcacgggccgggcgtctcgactcccgcgcgcgctcggctggtcccagtccccgggagaagaagcggaggagggagagagccagcgaggcggcccaggggagcgggcgcgagtggcggctgccggagccgcctgtgcacgggcggcggcgaggcgagggtggcggtcgcctgagcagctagagccggggcggcgcggaatccgcatccgccgcgagtgtgatgaagctaccctgcctcgctgctccgcttgccgccagctgacaccgcctgcacccagcccgcccgggaggggagacgccgcggggccgtgaccttggcggaggagggcacactgataattcttgtatcttgagagtggaccaagttttgggtgacatggcccaggggaataattatgggcagaccagcaacggggtggccgatgaatcacccaacatgctggtgtacagaaagatggaagacgtcatagcacggatgcaagatgaaaaaaatggaattcctattcgtacggtcaaaagctttctttccaagatacctagcgtcttctctggttcagacattgttcaatggttgataaagaacttaactatagaagatccagccgtttacctctgcaagagaacaatgcaaaacaaggcacgactggagctcgcagactatgaggctgagagcctggccaggctgcagagagcatttgcccggaagtgggagttcattttcatgcaagcagaagcacaagcaaaagtggacaagaagagagacaagattgaaaggaagatccttgacagccaagagagagcgttctgggacgtgcacaggcccgtgcctggatgtgtaaatacaactgaagtggacattaagaagtcatccagaatgagaaacccccacaaaacacggaagtctgtctatggtttacaaaatgatattagaagtcacagtcctacccacacacccacaccagaaactaaacctccaacagaagatgagttacaacaacagataaaatattggcaaatacagttagatagacatcggttaaaaatgtcaaaagtcgctgacagtctactaagttacacggaacagtatttagaatacgacccgtttcttttgccacctgacccttctaacccatggctgtccgatgacaccactttctgggaacttgaggcaagcaaagaaccgagccagcagagggtaaaacgatggggttttggcatggacgaggcattgaaagacccagttgggagagaacagttccttaaatttctagagtcagaattcagctcggaaaatttaagattctggctggcagtggaggacctgaaaaagaggcctattaaagaagtaccctcaagagttcaggaaatatggcaagagtttctggctcccggagcccccagtgctattaacttggattccaagagttatgacaaaaccacacagaacgtgaaggaacctggacgatacacatttgaagatgctcaggagcacatttacaaactgatgaaaagtgattcatacccacgttttataagatccagtgcctatcaggagcttctacaggcaaagaaaaagggcagaaacatccctattttcccatgccataaaaactgtacaccaacactgagggccagcactaacctgttatgaaaagaggggaaatctctcacgtccaagaggttaacaagccttgctcagtcttactaaacggatcatcttgtagcatgaatgcagactggagtcactgcacacactttgtagctcaatgttgtgacctggagcagaggacattagaacaagatgttgcatgagcaaaggacctaaattgttatttttgtgtgtacattccatctccaatggactcttccgtctcaatgcctccattccaaactgttgtctgctttctttctccttctactatgctggatctgtgtctcttcctttttaacaagttcaagtgaagtaaaaccttttctttttttccttctttctctctctctctctctcaaagcttcagttagacacacagttcactgaaaattcagtcagtcaaaaactggaagaactgtaaaagaaaaaagtatatatcaataagtatacatgtggcttcacatttattaaacaataaattccgcacagaaagtttcatttcaccaatgtgtcacagtcagaaacaaactcatgtcttcgtctgttgtctgtacattctccgttaatgtttctcgcatttatttttataccatatttaaagaagaaacaccttttactccaaatgtattaaagttgatcccttctctgtaaatttgtgtatgtttatattgttgttttatctttcattaaaagatgcagaatctcaaaaaaaaa

SEQ ID NO: 400 - DNA, 1509 bp, Artificial Sequence
  ACTA1
ccaccgcagcggacagcgccaagtgaagcctcgcttcccctccgcggcgaccagggcccgagccgagagtagcagttgtagctacccgcccagaaactagacacaatgtgcgacgaagacgagaccaccgccctcgtgtgcgacaatggctccggcctggtgaaagccggcttcgccggggatgacgcccctagggccgtgttcccgtccatcgtgggccgcccccgacaccagggcgtcatggtcggtatgggtcagaaagattcctacgtgggcgacgaggctcagagcaagagaggtatcctgaccctgaagtaccctatcgagcacggcatcatcaccaactgggatgacatggagaagatctggcaccacaccttctacaacgagcttcgcgtggctcccgaggagcaccccaccctgctcaccgaggcccccctcaatcccaaggccaaccgcgagaagatgacccagatcatgtttgagaccttcaacgtgcccgccatgtacgtggccatccaggccgtgctgtccctctacgcctccggcaggaccaccggcatcgtgctggactccggcgacggcgtcacccacaacgtgcccatttatgagggctacgcgctgccgcacgccatcatgcgcctggacctggcgggccgcgatctcaccgactacctgatgaagatcctcactgagcgtggctactccttcgtgaccacagctgagcgcgagatcgtgcgcgacatcaaggagaagctgtgctacgtggccctggacttcgagaacgagatggcgacggccgcctcctcctcctccctggaaaagagctacgagctgccagacgggcaggtcatcaccatcggcaacgagcgcttccgctgcccggagacgctcttccagccctccttcatcggtatggagtcggcgggcattcacgagaccacctacaacagcatcatgaagtgtgacatcgacatcaggaaggacctgtatgccaacaacgtcatgtcggggggcaccacgatgtaccctgggatcgctgaccgcatgcagaaagagatcaccgcgctggcacccagcaccatgaagatcaagatcatcgccccgccggagcgcaaatactcggtgtggatcggcggctccatcctggcctcgctgtccaccttccagcagatgtggatcaccaagcaggagtacgacgaggccggcccttccatcgtccaccgcaaatgcttctagacacactccacctccagcacgcgacttctcaggacgacgaatcttctcaatgggggggcggctgagctccagccaccccgcagtcactttctttgtaacaacttccgttgctgccatcgtaaactgacacagtgtttataacgtgtacatacattaacttattacctcattttgttatttttcgaaacaaagccctgtggaagaaaatggaaaacttgaagaagcattaaagtcattctgttaagctgcgtaaaaaaaaaaaaaaaaaaa

SEQ ID NO: 401 - DNA, 665 bp, Artificial Sequence
  SST
gggagacggttgagagcacacaagccgctttaggagcgaggttcggagccatcgctgctgcctgctgatccgcgcctagagtttgaccagccactctccagctcggctttcgcggcgccgagatgctgtcctgccgcctccagtgcgcgctggctgcgctgtccatcgtcctggccctgggctgtgtcaccggcgctccctcggaccccagactccgtcagtttctgcagaagtccctggctgctgccgcggggaagcaggaactggccaagtacttcttggcagagctgctgtctgaacccaaccagacggagaatgatgccctggaacctgaagatctgtcccaggctgctgagcaggatgaaatgaggcttgagctgcagagatctgctaactcaaacccggctatggcaccccgagaacgcaaagctggctgcaagaatttcttctggaagactttcacatcctgttagctttcttaactagtattgtccatatcagacctctgatccctcgcccccacaccccatctctcttccctaatcctccaagtcttcagcgagacccttgcattagaaactgaaaactgtaaatacaaaataaaattatggtgaaattatgaaaaatgtgaaaaaaaaaaaaaaaaaaaaaaaaaaaaaaaaaaa

SEQ ID NO: 402 - DNA, 2980 bp, Artificial Sequence
  SPOCK3
ggggggagcgcgccgggcgcagggagctgagtggacggctcgagacggcggcgcgtgcagcagctccagaaagcagcgagttggcagagcagggctgcatttccagcaggagctgcgagcacagtgctggctcacaacaagatgctcaaggtgtcagccgtactgtgtgtgtgtgcagccgcttggtgcagtcagtctctcgcagctgccgcggcggtggctgcagccggggggcggtcggacggcggtaattttctggatgataaacaatggctcaccacaatctctcagtatgacaaggaagtcggacagtggaacaaattccgagacgatgattatttccgcacttggagtccaggaaaacccttcgatcaggctttagatccagctaaggatccatgcttaaagatgaaatgtagtcgccataaagtatgcattgctcaagattctcagactgcagtctgcattagtcaccggaggcttacacacaggatgaaagaagcaggagtagaccataggcagtggaggggtcccatattatccacctgcaagcagtgcccagtggtctatcccagccctgtttgtggttcagatggtcatacctactcttttcagtgcaaactagaatatcaggcatgtgtcttaggaaaacagatctcagtcaaatgtgaaggacattgcccatgtccttcagataagcccaccagtacaagcagaaatgttaagagagcatgcagtgacctggagttcagggaagtggcaaacagattgcgggactggttcaaggcccttcatgaaagtggaagtcaaaacaagaagacaaaaacattgctgaggcctgagagaagcagattcgataccagcatcttgccaatttgcaaggactcacttggctggatgtttaacagacttgatacaaactatgacctgctattggaccagtcagagctcagaagcatttaccttgataagaatgaacagtgtaccaaggcattcttcaattcttgtgacacatacaaggacagtttaatatctaataatgagtggtgctactgcttccagagacagcaagacccaccttgccagactgagctcagcaatattcagaagcggcaaggggtaaagaagctcctaggacagtatatccccctgtgtgatgaagatggttactacaagccaacacaatgtcatggcagtgttggacagtgctggtgtgttgacagatatggaaatgaagtcatgggatccagaataaatggtgttgcagattgtgctatagattttgagatctccggagattttgctagtggcgattttcatgaatggactgatgatgaggatgatgaagacgatattatgaatgatgaagatgaaattgaagatgatgatgaagatgaaggggatgatgatgatggtggtgatgaccatgatgtatacatttgattgatgacagttgaaatcaataaattctacatttctaatatttacaaaaatgatagcctatttaaaattatcttcttccccaataacaaaatgattctaaacctcacatatattttgtataattatttgaaaaattgcagctaaagttatagaactttatgtttaaataagaatcatttgctttgagtttttatattccttacacaaaaagaaaatacatatgcagtctagtcagacaaaataaagttttgaagtgctactataataagtttttcacgagaacaaactttgtaaatcttccataagcaaaatgacagctagtgcttgggatcgtacatgttaattttctgaaagataattctaagtgaaatttaaaataaataaatttttaatgacctgggtcttaaggatttaggaaaaatatgcatgctttaattgcatttccaaagtagcatcttgctagacctagttgagtcaggataacagagagataccacatggcaagaaaaacaaagtgacaattgtagagtcctcaattgtgtttacattaatagtggtgtttttacctatgaaattattctggatctaataggacattttacaaaatggcaagtatggaaaaccatggattctgaaagttaaaaatttagttgttctccccaatgtgtattttaatttggatggcagtctcatgcagattttttaaaagattctttaataacatgatttgtttgcctttctagatttctttatctttctgaccagcaacttagggagcagaatttaaattaggaagacaaagggaaagattcatttaaaccatatttttacaaagtttgtcatttgccccaaggtcaaattttaaattcttaattttcattttatttcccattttaggtaaaagtttgcatttaatcttagaattatgttatttttgttagtagtgtggaaacttagagaacttattgtatggtgccttgcaaaaatagagatagaaagattttagcatgcataccaatatagtatattacgcaatatataagcacacctaattaacagattaatatcagtaaaggtattgctgctggaatgaagaaaatgggatacgtttgtttctttttttctattgttacataattgccatgtggacttgtttatgattattgtgtagagtagcatttaagatttaactgtagcaaaaattactttaaccgctgtatttaagttagcatgttaattaattgtgtagacattttggcacaccatcacttttaactatatcataccaatggttttgtgcccataataaaaatggaaaaacctgttgaatgttacgtattggtatctttaatttcaacagtgggtaaactggtttcccagtatacaattcattgaaagcaaaattgattaattatttccatttaatttatacacactcaatacaaaatttaatgttgactttacgtaataaagtataatgcattttcttttttactgtttatgtatagtttacaaaataaagaatcttgtaaccaaa

SEQ ID NO: 403 - DNA, 8810 bp, Artificial Sequence
  SCN2A
atgctgttttctaacagacattgggtaccatcgaatgactgtcagaacagaaagctaaggcaaaggagggaggatgctgtggtcatcctttcttgtttttttcttctttaatgaggatagagcacatgtgagattttactttctactccagtaaaaattctgaagaattgcattggagactgttatattcaacacatacgtggattctgtgttatgatttacatttttctttatttcagcactttcttatgcaaggagctaaacagtgattaaaggagcaggatgaaaagatggcacagtcagtgctggtaccgccaggacctgacagcttccgcttctttaccagggaatcccttgctgctattgaacaacgcattgcagaagagaaagctaagagacccaaacaggaacgcaaggatgaggatgatgaaaatggcccaaagccaaacagtgacttggaagcaggaaaatctcttccatttatttatggagacattcctccagagatggtgtcagtgcccctggaggatctggacccctactatatcaataagaaaacgtttatagtattgaataaagggaaagcaatctctcgattcagtgccacccctgccctttacattttaactcccttcaaccctattagaaaattagctattaagattttggtacattctttattcaatatgctcattatgtgcacgattcttaccaactgtgtatttatgaccatgagtaaccctccagactggacaaagaatgtggagtatacctttacaggaatttatacttttgaatcacttattaaaatacttgcaaggggcttttgtttagaagatttcacatttttacgggatccatggaattggttggatttcacagtcattacttttgcatatgtgacagagtttgtggacctgggcaatgtctcagcgttgagaacattcagagttctccgagcattgaaaacaatttcagtcattccaggcctgaagaccattgtgggggccctgatccagtcagtgaagaagctttctgatgtcatgatcttgactgtgttctgtctaagcgtgtttgcgctaataggattgcagttgttcatgggcaacctacgaaataaatgtttgcaatggcctccagataattcttcctttgaaataaatatcacttccttctttaacaattcattggatgggaatggtactactttcaataggacagtgagcatatttaactgggatgaatatattgaggataaaagtcacttttattttttagaggggcaaaatgatgctctgctttgtggcaacagctcagatgcaggccagtgtcctgaaggatacatctgtgtgaaggctggtagaaaccccaactatggctacacgagctttgacacctttagttgggcctttttgtccttatttcgtctcatgactcaagacttctgggaaaacctttatcaactgacactacgtgctgctgggaaaacgtacatgatattttttgtgctggtcattttcttgggctcattctatctaataaatttgatcttggctgtggtggccatggcctatgaggaacagaatcaggccacattggaagaggctgaacagaaggaagctgaatttcagcagatgctcgaacagttgaaaaagcaacaagaagaagctcaggcggcagctgcagccgcatctgctgaatcaagagacttcagtggtgctggtgggataggagttttttcagagagttcttcagtagcatctaagttgagctccaaaagtgaaaaagagctgaaaaacagaagaaagaaaaagaaacagaaagaacagtctggagaagaagagaaaaatgacagagtccgaaaatcggaatctgaagacagcataagaagaaaaggtttccgtttttccttggaaggaagtaggctgacatatgaaaagagattttcttctccacaccagtccttactgagcatccgtggctcccttttctctccaagacgcaacagtagggcgagccttttcagcttcagaggtcgagcaaaggacattggctctgagaatgactttgctgatgatgagcacagcacctttgaggacaatgacagccgaagagactctctgttcgtgccgcacagacatggagaacggcgccacagcaatgtcagccaggccagccgtgcctccagggtgctccccatcctgcccatgaatgggaagatgcatagcgctgtggactgcaatggtgtggtctccctggtcgggggcccttctaccctcacatctgctgggcagctcctaccagagggcacaactactgaaacagaaataagaaagagacggtccagttcttatcatgtttccatggatttattggaagatcctacatcaaggcaaagagcaatgagtatagccagtattttgaccaacaccatggaagaacttgaagaatccagacagaaatgcccaccatgctggtataaatttgctaatatgtgtttgatttgggactgttgtaaaccatggttaaaggtgaaacaccttgtcaacctggttgtaatggacccatttgttgacctggccatcaccatctgcattgtcttaaatacactcttcatggctatggagcactatcccatgacggagcagttcagcagtgtactgtctgttggaaacctggtcttcacagggatcttcacagcagaaatgtttctcaagataattgccatggatccatattattactttcaagaaggctggaatatttttgatggttttattgtgagccttagtttaatggaacttggtttggcaaatgtggaaggattgtcagttctccgatcattccggctgctccgagttttcaagttggcaaaatcttggccaactctaaatatgctaattaagatcattggcaattctgtgggggctctaggaaacctcaccttggtattggccatcatcgtcttcatttttgctgtggtcggcatgcagctctttggtaagagctacaaagaatgtgtctgcaagatttccaatgattgtgaactcccacgctggcacatgcatgactttttccactccttcctgatcgtgttccgcgtgctgtgtggagagtggatagagaccatgtgggactgtatggaggtcgctggccaaaccatgtgccttactgtcttcatgatggtcatggtgattggaaatctagtggttctgaacctcttcttggccttgcttttgagttccttcagttctgacaatcttgctgccactgatgatgataacgaaatgaataatctccagattgctgtgggaaggatgcagaaaggaatcgattttgttaaaagaaaaatacgtgaatttattcagaaagcctttgttaggaagcagaaagctttagatgaaattaaaccgcttgaagatctaaataataaaaaagacagctgtatttccaaccataccaccatagaaataggcaaagacctcaattatctcaaagacggaaatggaactactagtggcataggcagcagtgtagaaaaatatgtcgtggatgaaagtgattacatgtcatttataaacaaccctagcctcactgtgacagtaccaattgctgttggagaatctgactttgaaaatttaaatactgaagaattcagcagcgagtcagatatggaggaaagcaaagagaagctaaatgcaactagttcatctgaaggcagcacggttgatattggagctcccgccgagggagaacagcctgaggttgaacctgaggaatcccttgaacctgaagcctgttttacagaagactgtgtacggaagttcaagtgttgtcagataagcatagaagaaggcaaagggaaactctggtggaatttgaggaaaacatgctataagatagtggagcacaattggttcgaaaccttcattgtcttcatgattctgctgagcagtggggctctggcctttgaagatatatacattgagcagcgaaaaaccattaagaccatgttagaatatgctgacaaggttttcacttacatattcattctggaaatgctgctaaagtgggttgcatatggttttcaagtgtattttaccaatgcctggtgctggctagacttcctgattgttgatgtctcactggttagcttaactgcaaatgccttgggttactcagaacttggtgccatcaaatccctcagaacactaagagctctgaggccactgagagctttgtcccggtttgaaggaatgagggttgttgtaaatgctcttttaggagccattccatctatcatgaatgtacttctggtttgtctgatcttttggctaatattcagtatcatgggagtgaatctctttgctggcaagttttaccattgtattaattacaccactggagagatgtttgatgtaagcgtggtcaacaactacagtgagtgcaaagctctcattgagagcaatcaaactgccaggtggaaaaatgtgaaagtaaactttgataacgtaggacttggatatctgtctctacttcaagtagccacgtttaagggatggatggatattatgtatgcagctgttgattcacgaaatgtagaattacaacccaagtatgaagacaacctgtacatgtatctttattttgtcatctttattatttttggttcattctttaccttgaatcttttcattggtgtcatcatagataacttcaaccaacagaaaaagaagtttggaggtcaagacatttttatgacagaagaacagaagaaatactacaatgcaatgaaaaaactgggttcaaagaaaccacaaaaacccatacctcgacctgctaacaaattccaaggaatggtctttgattttgtaaccaaacaagtctttgatatcagcatcatgatcctcatctgccttaacatggtcaccatgatggtggaaaccgatgaccagagtcaagaaatgacaaacattctgtactggattaatctggtgtttattgttctgttcactggagaatgtgtgctgaaactgatctctcttcgttactactatttcactattggatggaatatttttgattttgtggtggtcattctctccattgtaggaatgtttctggctgaactgatagaaaagtattttgtgtcccctaccctgttccgagtgatccgtcttgccaggattggccgaatcctacgtctgatcaaaggagcaaaggggatccgcacgctgctctttgctttgatgatgtcccttcctgcgttgtttaacatcggcctccttcttttcctggtcatgttcatctacgccatctttgggatgtccaattttgcctatgttaagagggaagttgggatcgatgacatgttcaactttgagacctttggcaacagcatgatctgcctgttccaaattacaacctctgctggctgggatggattgctagcacctattcttaatagtggacctccagactgtgaccctgacaaagatcaccctggaagctcagttaaaggagactgtgggaacccatctgttgggattttcttttttgtcagttacatcatcatatccttcctggttgtggtgaacatgtacatcgcggtcatcctggagaacttcagtgttgctactgaagaaagtgcagagcctctgagtgaggatgactttgagatgttctatgaggtttgggagaagtttgatcccgatgcgacccagtttatagagtttgccaaactttctgattttgcagatgccctggatcctcctcttctcatagcaaaacccaacaaagtccagctcattgccatggatctgcccatggtgagtggtgaccggatccactgtcttgacatcttatttgcttttacaaagcgtgttttgggtgagagtggagagatggatgcccttcgaatacagatggaagagcgattcatggcatcaaacccctccaaagtctcttatgagcccattacgaccacgttgaaacgcaaacaagaggaggtgtctgctattattatccagagggcttacagacgctacctcttgaagcaaaaagttaaaaaggtatcaagtatatacaagaaagacaaaggcaaagaatgtgatggaacacccatcaaagaagatactctcattgataaactgaatgagaattcaactccagagaaaaccgatatgacgccttccaccacgtctccaccctcgtatgatagtgtgaccaaaccagaaaaagaaaaatttgaaaaagacaaatcagaaaaggaagacaaagggaaagatatcagggaaagtaaaaagtaaaaagaaaccaagaattttccattttgtgatcaattgtttacagcccgtgatggtgatgtgtttgtgtcaacaggactcccacaggaggtctatgccaaactgactgtttttacaaatgtatacttaaggtcagtgcctataacaagacagagacctctggtcagcaaactggaactcagtaaactggagaaatagtatcgatgggaggtttctattttcacaaccagctgacactgctgaagagcagaggcgtaatggctactcagacgataggaaccaatttaaaggggggagggaagttaaatttttatgtaaattcaacatgtgacacttgataatagtaattgtcaccagtgtttatgttttaactgccacacctgccatatttttacaaaacgtgtgctgtgaatttatcacttttctttttaattcacaggttgtttactattatatgtgactatttttgtaaatgggtttgtgtttggggagagggattaaagggagggaattctacatttctctattgtattgtataactggatatattttaaatggaggcatgctgcaattctcattcacacataaaaaaatcacatcacaaaagggaagagtttacttcttgtttcaggatgtttttagatttttgaggtgcttaaatagctattcgtatttttaaggtgtctcatccagaaaaaatttaatgtgcctgtaaatgttccatagaatcacaagcattaaagagttgttttatttttacataacccattaaatgtacatgtatatatgtatatatgtatatgtgcgtgtatatacatatatatgtatacacacatgcacacacagagatatacacataccattacattgtcattcacagtcccagcagcatgactatcacatttttgataagtgtcctttggcataaaataaaaatatcctatcagtcctttctaagaagcctgaattgaccaaaaaacatccccaccaccactttataaagttgattctgctttatcctgcagtattgtttagccatcttctgctcttggtaaggttgacatagtatatgtcaatttaaaaaataaaagtctgctttgtaaatagtaattttacccagtggtgcatgtttgagcaaacaaaaatgatgatttaagcacactacttattgcatcaaatatgtaccacagtaagtatagtttgcaagctttcaacaggtaatatgatgtaattggttccattatagtttgaagctgtcactgctgcatgtttatcttgcctatgctgctgtatcttattccttccactgttcagaagtctaatatgggaagccatatatcagtggtaaagtgaagcaaattgttctaccaagacctcattcttcatgtcattaagcaataggttgcagcaaacaaggaagagcttcttgctttttattcttccaaccttaattgaacactcaatgatgaaaagcccgactgtacaaacatgttgcaagctgcttaaatctgtttaaaatatatggttagagttttctaagaaaatataaatactgtaaaaagttcattttattttatttttcagccttttgtacgtaaaatgagaaattaaaagtatcttcaggtggatgtcacagtcactattgttagtttctgttcctagcacttttaaattgaagcacttcacaaaataagaagcaaggactaggatgcagtgtaggtttctgcttttttattagtactgtaaacttgcacacatttcaatgtgaaacaaatctcaaactgagttcaatgtttatttgctttcaatagtaatgccttatcattgaaagaggcttaaagaaaaaaaaaatcagctgatactcttggcattgcttgaatccaatgtttccacctagtctttttattcagtaatcatcagtcttttccaatgtttgtttacacagatagatcttattgacccatatggcactagaactgtatcagatataatatgggatcccagctttttttcctctcccacaaaaccaggtagtgaagttatattaccagttacagcaaaatactttgtgtttcacaagcaacaataaatgtagattctttatactgaagctattgacttgtagtgtgttggtgaaatgcatgcaggaaaatgctgttaccataaagaacggtaaaccacattacaatcaagccaaaagaataaaggtttcgcttttgtttttgtatttaattgttgtctttgtttctatctttgaaatgccatttaaaggtagatttctatcatgtaaaaataatctatctgaaaaacaaatgtaaagaacacacattaattactataattcatctttcaattttttcatggaatggaagttaattaagaagagtgtattggataactactttaatattggccaaaaagctagatatggcatcaggtagactagtggaaagttacaaaaattaataaaaaattgactaacattttaaaaaaaaaaaaaaaaaa

SEQ ID NO: 404 - DNA, 5990 bp, Artificial Sequence
  ZNF557
ctgccacagacccgcgccaggacgaccctgcctccgcggctgtccctagccagggcccaacctggttctattaataactaagcaaactagaacacctcagccggaggctggggtgcgcggctgctgcacctgcagcctgaacccgggggtcctgacacgccgcattttgggctgggaccagctggagccggaagcggaggtgcagtgtggctagccggagaccggaagcggaagcgcgcttgtgtcttgtgagaagagccgcgcttgcagcgtctgggagaatctttcggtctccgcgagagacgaaaaaagtataattcaagctcagatttgtgttgaaaccagcctcaagtttcacctatcctcactgatccgtggacttctgtatgatcagggtgctgtcctgagagcgctgcgggataaaggaggagcgtcctgcttcccggctgccctgttgctgtcggagtcacaggatggcggctgtcgtcctgcccccaactgccgctctgtcttccctgttcccagcctctcagcgagaaggacacacagagggcggagagctggttaatgagctcctgaaaagctggctaaagggcttggtgacctttgaggatgtggccgtggagttcacccaggaggagtgggcattgctggaccctgcccaaaggacactgtacagggacgtgatgctggagaactgcaggaacctggcctcactggggaaccaagttgataaacctaggctgatctcccagctggagcaagaagataaagtgatgacagaagagagaggaattctctcaggtacctgtccagatgtggagaatccatttaaagccaaagggttaactcctaagctgcatgtttttcgaaaagaacaatctagaaatatgaaaatggagaggaatcatcttggagcaacactcaacgaatgtaatcagtgttttaaagtcttcagcacaaaatcttcccttacacggcacaggaagattcatactggagaaagaccctatggctgcagtgaatgtgggaaatcctacagcagtagatcttaccttgctgttcataagagaatccacaatggggagaaaccctatgaatgcaatgactgtgggaaaaccttcagcagcagatcttaccttactgttcataagagaatccacaatggggagaaaccctacgaatgcagtgactgtgggaaaaccttcagcaattcctcatacctcagaccgcacttgagaattcacactggagaaaaaccgtacaaatgtaaccagtgttttcgtgagttccgcactcagtcaatcttcacaaggcacaagagagttcatacgggggagggtcattatgtatgtaatcagtgtggaaaggctttcggcacgaggtcatctctttcttcgcactatagcattcatacaggggagtacccttacgaatgccacgattgtgggagaaccttcaggaggaggtcgaatctgacacagcacataagaactcatactggagaaaaaccctacacatgtaatgagtgtgggaaatcctttaccaatagcttttctcttacaattcacaggagaatacataatggagagaaatcctatgagtgcagtgattgtggaaaatcctttaatgttctctcatccgttaagaaacacatgagaactcacactggaaaaaaaccctatgaatgtaattattgcgggaaatccttcacaagtaactcctacctttctgtgcatacgagaatgcataataggcaaatgtgaattcaataactgtgggaaaagcattcattgatctttcatgcctcagataacatgagcaaactctaacaagatgtatgaatcacctgctactgtgtaacaaattaccccccaaaattttgtggcttcaaacaaaaacacttgttatctcaaaatttttgtaggtcaggaattcagaaacaacatagctctatagttcttcaggatatctcaagaggttacagtccagatgtcagcagaactgtaatcatccagaattgttactggtgaagggaccacttccaaatggcttacaagcccgacaagtgcatgctagctgtttccaagggagctgcgcttccaaatcacgtaggcctctcaacagggctgagtttctttatggaagcaacttctccccaaagccagtgatctaaaggagccaacacagaaagcataatgtcttttatgacctagcttcagtgagatatgttttcatgtccctgttacattggtcatacacaccaatcctgatacaatgtggaagaacaccacaggaggtatgaacagtagacatttggaaccatctggaaaacttgccatgaaatcagtggaggaaagccttcagctgaccctcatttttttttttttaagacaatgtctcactctgtcacccagtctggagcgcagtggtgtgatcacagctcactgcagcctctacttcctgggatcaagtaattctcctgccccagcctccaatgtagctgggactacaggtgcatgacaccatgtctggctaatttgtttttttttaaactagagggagggttttgccatgttgcccagactagtctcaaactcctaggttcaagcagtcctttcatcttggcctccagaagtactgggattacaggcatgaaccaccatgcccagccaacttctaaactgatcaatatgggagtagcattcaatcacccacaggttaactcactctagagagaaatcttgtgagtgtaatctgtatggtaaaactttgagctcaaactttccccctaccaaaaaaaaagtatctactggggagctgcccaggtaatgcagtagctgtaggaaagccttcagtgatggcttcagggagtcacatgacaactcacaataaggggaaaccctgtgtgtggcatcaaaaatggaaaaccaggggacactcattccttaagtcacatttcggagatcatacaacagaggaatatgttgagtatacacagtgttgaaaagcctgtgacacaaacagtcatattaccaagcacaagacagtatagtttggtatgctataaaagccttgaatattctctccatttttaagaagtgagattcatactagaaaaaccattgaattccatcagtattagaatgtcatttttccacatttttaggaacctaactcagtgtaagataacaatttatacaatttattttttgagacagggtttcatctgtgcccaggctgtagtgcagtggtgcaatcttggcttattgtaacctctgcctcccaggcttaagggatcctcccacctcagcctcccaagtagctgggactgtaggcatgcaccaccatgcctgtctagtttttgtaaagatggggattcaccatgtttcccaggctgctctcaaactcctgggctcaagtgatccacctgcctcagcctcccaaaatgctgggaatacaggaacgagctaccactctcagccagaacttcttaagataaaggatgagggaatgttttcagtgatacctcttatattaggaaaaatatgtaaatgttccttggatgcaatactcacgagtgtattaatttcagaaaaattttcagtgattcctccctttatgcatgagagaattcatttagaggaagccctaggaacgtaatcaatgttaggatgcctcatctcttaactgagtggccacgcagtaacttagaacaaaaggtgtaagtgctatgaatgtggaattaccttcatcaatgtctcatttgtaggttgggccactagctcgttcattttcagtcttttaatataaacatttatggctatagtggtcctgaaaatcttactacctcgttttatatacagtgtatttattataattctaaaacatcaatacaccaaatattcagaaaggtatttccaaacagctcctgagtgatctagtttgttataatagaaattagacatttgccaggtgtggtggctcacacctataaacctagcattttgggaggctgaggcgggcagatcaccggaggtaaggagcttgagaccagcctggccaacatggtgaaaccccgcttctactaaaaaatacaaaaattagccgggtgtggtggcaggcatctataatcccagctactcaagaggctgaggaaggagaatcacttgaacccgggaaatggaggttgcagtgagccaagatcatgccacttcactccagcctgggcaaaagagtgcaactctgtctcaaaaaaaaaaaaatcagacaatatttgatatatttttttctaatttaatagtattttgccagagtacatggactttgtgattttggttgttttctctttgtgtcctaatatagcaaatactgtttctttttttttttttttttttttttgagacggagtcttgctctgttgtccaggctagaatgcagtggcgcgattgtggctcactgcaagctctgcctcccagattcacgccatcctcctgcctcagcctcccgagtagctgggactacaggtgcccatcaccatgcccggctaatttttcatatttttagtagaaatggggtttcactgtgttagccagtatggtctcaatctcctgacctcgtgatccacctgcctcggcctcccaaagcactgggattacaggcgtgagccaccatgcccggcacaaatactgtttcttaatgttcattctccctacttaaagaaaaagataagttgtcaatgagcagtattgaaaatgtacagtggggccaggcgccatggctcatgcctgtaatcccagcactttgggaggccgaggcaggcggaccacctgaggtcaggagttcaagactagcttggccaacgtggtgaaacctcgtctctactaaaaaaaatacaaaaattagctgggcgtgatgacaggtgcctgtaatcccagctacttgggaggctgaggcaggagaatcgcttgagcctgggaagcggaggttgcagtgagccgagattgcacaaccacactccagcttgggcgacagagtgagactccatctcaaaaaaagatgtacagtgtactaggctttcctgaagcttagacaggctttatcccactctgctggctaaaagaagtaggaataacgcactgggtgagacaccgtctggcttattctcatctattttcttttcattcttttggaaagtggacacaaagcatagagttaaaagagcttttttttttttttttttttttttcttcactgtggtgataaaaaccacagtgcaggggctgggcgtggtggctcacgcctgtaatcccaccactttgggaggccaaggcaggcggatcacctgaggtggggagttcgagaccagcctgatcaacatggagaaaacctgtctctcctaaaaatacaaaattaaccgagcatgttggcgcatgcctgtaatctcagctacttggaaggctgaggcaggagaattgcttcaaactgggcagaggttgcagtgagccaaggttgacccactgcactccagcctgggcaacaagagcaaaactccatctcaaaaaaaaaaaaaaagaaagaaacagtgccgaaaaatcacaatgatttgagttcttcaaaaacctttgattggctgcattggctctgttctgcatattactagacttcttacatgatcacaagtaaccactaattggttaaaaccaaagagagagagagagagagtgtgtgtgtgtgtgtgtgtgtttggttggggggtgttgtgttagcttccaggtgaatgcattatctgttaatcctgtttattgatctgtttttataagtgctccatgattctctgaaaacagtatactatgtatctaatttttggatacaggatggacatacgtactcaaactgtgtttttcaatttgtactgtatttgtttctctcgacctgacttagtgatagaggtatattaaagtcttccactagcatggtagattaacaaa

SEQ ID NO: 405 - DNA, 1386 bp, Artificial Sequence
  ANKRD7
ggccgtaactgccataacggccggctgcgcgaggcccttccagcatttccactttcgtcaggtactggagagggctgccggccggatgccagggcagaggggcagggcggacggctaggagttcaagaaacatcctggtctgagggaaaggctgcagcctgcaccgccatgaataagcttttcagcttctggaagaggaagaatgagacccgcagccagggctacaaccttcgagaaaaggatttaaagaaacttcacagagctgcttcagtcggggatttgaagaagctgaaggaataccttcagatcaagaaatatgatgtaaatatgcaggacaaaaaatacagtgttgtccaatcttctagatggcttttatcctacaccactccgctgaatgactttataagaacacctttgcacctagcctgtgctaatggacatacagatgttgtacttttcctaattgagcaacaatgcaaaataaatgtccgggatagtgaaaacaaatccccattgattaaggcagtacagtgtcaaaatgaggattgtgctactattcttctaaactttggtgcagacccagatctgagggatattcgttataatactgttcttcactatgctgtttgtggtcaaagtttgtcattagttgaaaaactgcttgaatacgaagctgatcttgaagcgaaaaataaggatgggtatactccactattagttgccgttattaacaataatccaaaaatggtaaaatttcttctggagaaaggggctgatgtgaatgcttcagataattatcaaagaacagcccttattcttgctgtcagtggtgaaccaccatgtttagtaaagcttcttcttcagcaaggtgtggaattatgttacgaaggtattgtggattcacagctgaggaatatgtttatttccatggttttactgcatagatacccacaattcactgcgagccatggaaagaagaaacatgctaaatagacaccttattcttggcactacatgtgactaaaggaagatatggaacccatttctacaatttctttgccgcttccttgaattggaaaaatgtactttgaaagaaccgttaagtgaactattataatatttttgctgactacccagttgaagaaaagtttgttaattggatgggattttttttttttcacgttagaagacatgaagaaattttaaaagataaacatctatattgtgaaccatcagctgaaaagataaatttgtgttcaatatataggcagaaaaaaatttgtgtcaaaatgttgaatggaataataatgaggaaactgtgttaggcatgtattaaaacatttaaataaaataaaaatacatttcagctacaaaaaaaaaaaaaaa

SEQ ID NO: 406 - DNA, 1485 bp, Artificial Sequence
  ONECUT3
atggagctgagcctggagagcctggggggcctgcacagcgtggcccacgcgcaggcgggcgagctgctgagcccgggccacgcgcgctcggcggcggcgcagcaccgcggcctggtggcgcccgggcgcccgggcctggtggccggcatggcgagcctgctggacggcggcggcggcggcggcggtgggggcgccgggggcgcgggcggcgcgggcagcgcgggcggcggcgcggacttccgcggggaactggcgggcccgctgcacccggcaatgggcatggcctgcgaggcgccgggcctgggcggcacctacacgacgctcacgcccctgcagcacctgccgccgctcgcggccgtggccgacaagttccaccagcacgcggcggccgcggccgtggccggggcgcacggcggccatccccacgcgcacccgcacccggcggccgcgccgcccccgccacccccgccgcagcgtctggcggccagcgtgagcggcagcttcaccctcatgcgcgacgagcgggcggcgctcgcctccgtgggccacctctacggaccctacggcaaggagctgcccgccatggggtcgccgctgtcgccgctgcccaacgcgctgccgcccgcgctgcacggcgccccgcagcccccgccgccgccaccacccccgccgctggccgcctacggcccgccaggccacctggctggggacaagctgctgccgcccgccgccttcgagccgcacgccgcgctgctgggacgcgcggaggacgcactggcccgcgggctgcccggaggcggcggcggcacaggcagcggcggagcgggcagcgggagcgccgcggggctgctggcgccgctgggcgggctggcggcggccggggcgcacgggccgcacgggggaggcggcggccccggcgggagcggcggcggccccagcgcgggcgcagcggccgaggagatcaacaccaaggaggtggcgcagcgcatcacggcggagctgaagcgctacagcatcccgcaggcaatcttcgcgcagcggatcctgtgtcgctctcagggcacgctctccgacctgctgcgcaaccccaagccgtggagcaagctcaaatccggccgcgagaccttccgcaggatgtggaagtggctgcaggagccagagttccagcgcatgtcggcgctgcgcttggcagcctgcaagcgcaaggaacaggagcagcagaaggagcgcgccctgcagcccaagaagcagcgcctggtgttcaccgacctgcagcgacgcacgctgatcgccatcttcaaggagaacaagcggccgtccaaggagatgcaggtcaccatctcgcagcagctcggcttggagctcaacaccgtcagcaacttcttcatgaacgcgcggcgccgctgcatgaaccgctgggctgaggagcccagcacggcccccgggggccccgccggcgccacggccactttctccaaggcctga

SEQ ID NO: 407 - DNA, 1586 bp, Artificial Sequence
  SNTN
acaaaacagaagatgagagaatgggtggctgtatgcacagtacccaggacaaatctctccacttggaaggagatcccaatccttctgcagccccaacatccacctgcgcacctaggaaaatgcccaaaaggatttcaatatccaaacaactggcttcagtgaaagctctgaggaagtgctcagatctggaaaaagctattgccaccactgctctgattttcagaaattcttctgactctgatggtaaacttgaaaaagctattgccaaagatctgctgcaaacccaatttaggaatttcgcagagggacaagaaaccaagccaaaatacagagagatcctttctgaacttgatgagcacacagaaaataagctagattttgaagacttcatgatcttgctcttaagcatcactgtcatgtcagatctgctacaaaatatacggaatgtaaaaattatgaaatgaacagttttaaatatgctgtataaaataatggcaaaagacagtgttattaaaatgtttccatcttatttttgattaattgaatatatctatcatgcatctgaaattgcctaggatggttctgattgctggtattcagatccaatgtaactccaaatatttacccatacacttcaagaatgtttgaatgataaggtctctgtgtgctttacaataggatagatttgataccactgaataataaatggcttttgctgagtcagtagcgacctagagcactctacttatagtcattgagtcactcatttattcactaaacatttgttgagcatctacttgatggaactgctgaggatacagtaatgaattggccaggcaattccttccttcagacatgtttgcagaagtctagcagaagagatagacattgaacaatttttaaataattgcatacacagtataattagaattgaaataagggctataggatgctaaaagagattatcacctgatcggagttcaaaggtcagaaaagctttactgacattctataaaaagcaaaaaaaaaaaaattggtccatggatgccagggatatgggtgggaaatggggctgtccacaaatggcacaaggggagttttttattttattttattttattttattttattttattttgagacagagttttgctcttgttgcccaggctggagtgcaatggcacgatctcagcttactgcaacctcgatctcccaggttcaagtgattctcctgcctcagcctcctgagtagctgggattacaggcgtgtgccacgatgccaggctaattttttttgtatttttagtggagacggggtttcgccatgtcggccaggctggtctcgaactcctgacctcaggtgatccgcccacagcctcccaaagtgctgggattacaggcttgagccaccaagtctggccaaggggacttttaagggggctggaaatggtctccattttgattgtgaggtggtggctacaagattgcatgcatttgtcaaactcatagaactgcacactgaaaagagtgaattgtactgtatgtcaattatacctaaataaatctgacttaacaaaaaaataaaa

SEQ ID NO: 408 - DNA, 498 bp, Artificial Sequence
  DEFA1B
ggctgctccttgctatagaagacctgggacagaggactgctgtctgccctctctggtcaccctgcctagctagaggatctgtgaccccagccatgaggaccctcgccatccttgctgccattctcctggtggccctgcaggcccaggctgagccactccaggcaagagctgatgaggttgctgcagccccggagcagattgcagcggacatcccagaagtggttgtttcccttgcatgggacgaaagcttggctccaaagcatccaggctcaaggaaaaacatggcctgctattgcagaataccagcgtgcattgcaggagaacgtcgctatggaacctgcatctaccagggaagactctgggcattctgctgctgagcttgcagaaaaagaaaaatgagctcaaaatttgctttgagagctacagggaattgctattactcctgtaccttctgctcaatttcctttcctcatcccaaataaatgccttgttacaaga

SEQ ID NO: 409 - DNA, 918 bp, Artificial Sequence
  SPRR3
tcaccagatcccagaggctgaacacctcgaccttctctgcacagcaggtccagcatcctttgaagcatgagttcttaccagcagaagcagacctttaccccaccacctcagcttcaacagcagcaggtgaaacaacccagccagcctccacctcaggaaatatttgttcccacaaccaaggagccatgccactcaaaggttccacaacctggaaacacaaagattccagagccaggctgtaccaaggtccctgagccaggctgtaccaaggtccctgagccaggctgtaccaaggtccctgagccaggttgtaccaaggtccctgagccaggctgtaccaaggtccctgagccaggttgtaccaaggtccctgagccaggctacaccaaggtccctgaaccaggcagcatcaaggtccctgaccaaggcttcatcaagtttcctgagccaggtgccatcaaagttcctgagcaaggatacaccaaagttcctgtgccaggctacacaaagctaccagagccatgtccttcaacggtcactccaggcccagctcagcagaagaccaagcagaagtaatttggtgcacagacaagcccttgagaagccaaccaccagatgctggacaccctcttcccatctgtttctgtgtcttaattgtctgtagaccttgtaatcagcacattgtcaccccaagccatagtctctctcttatttgtatcctaaaaatacgtactataaagcttttgttcacacacactctgaagaatcctgtaagcccctgaattaagcagaaagtcttcatggcttttctggtcttcggctgctcagggttcatctgaagattcgaatgaaaagaaatgcatgtttcctgctcttccctcattaaattgcttttaattccaaaaaaaaaaaaaaaaa

SEQ ID NO: 410 - DNA, 6163 bp, Artificial Sequence
  MYH2
aggacgggcctttcaagagggacactggtcacaccgcccagtgtcagcagcagctgctagttctgaactgtctcactcccaggctacatcttctcacttgctaacaaggacctctgagttcagcagccatgagttcagactcagaattggctgtttttggggaggctgctcctttcctccgaaagtctgaaagggagcgcattgaggcccagaataggccctttgatgccaaaacatctgtctttgtggcggagcccaaagaatcctttgtcaaagggaccatccagagcagagaaggaggaaaagtgacggtgaagactgagggaggagcgactctgacagtgaaggatgatcaggtcttccccatgaaccctcccaaatatgacaagatcgaggatatggccatgatgactcatctgcatgagcctgctgtgctgtacaacctcaaagaacgttatgcagcctggatgatctacacctattcaggtctcttctgtgtcactgtcaacccctacaagtggctgcctgtgtataagcccgaggtggtgacagcctaccgaggcaaaaagcgccaggaggccccgccccacatcttctccatctctgacaacgcctatcagttcatgctgactgaccgagagaatcagtcaatcctgatcactggagaatctggtgcagggaagactgtgaacaccaagcgtgtcatccagtactttgcaacaattgcagttactggtgagaagaagaaggaagaaattacttctggcaaaatacaggggactctggaagatcaaatcatcagtgccaaccccctactggaggcctttggcaacgccaagaccgtgaggaatgacaactcctctcgctttggtaaattcatcagaatccactttggcactactggaaaactggcatctgctgatattgaaacatatctgctagagaagtctagagttgttttccagcttaaggctgagagaagttatcatattttttaccagattacatcgaataagaaaccagaacttattgaaatgcttctgattaccacgaacccatatgattacccatttgtcagtcaaggggagatcagtgtggccagcatcgatgatcaggaagaactgatggccacagatagtgctattgatattttgggctttactaatgaagaaaaggtctccatttacaagctcacgggggctgtgatgcattatgggaacctaaaatttaagcaaaagcagcgtgaggagcaagcagagccagatggcacagaagttgctgacaaggcggcctacctccagagtctgaactctgcagatctgctcaaagctctctgctaccccagggtcaaggtcggcaatgagtatgtcaccaaaggccagactgtagaacaggtgtccaacgcagtaggtgctctggccaaagccgtctacgagaagatgttcctgtggatggttgcccgcatcaaccagcagctggacaccaagcagcccaggcagtacttcatcggggtcttggacattgctggttttgagatttttgatttcaacagcctggagcagctgtgcatcaacttcaccaatgagaaactgcaacagtttttcaaccaccacatgttcgtgctggagcaggaggagtacaagaaggaaggcatcgagtggacgttcatcgacttcgggatggacctggctgcctgcatcgagctcatcgagaagcctatgggcatcttctccatcctggaagaggagtgcatgttccctaaggcaacagacacctccttcaagaacaagctgtatgaccagcacctgggcaagtctgccaacttccagaagcccaaggtggtcaaaggcaaggccgaggcccacttcgctctgattcactatgctggtgttgtggactacaacattactggctggctggagaagaacaaggaccccctgaatgagaccgtggttggactgtaccagaagtctgcaatgaaaactctagctcagctcttctctggggctcaaactgctgaaggagagggagctggtggaggggccaagaaaggtggtaagaagaagggctcttctttccagacagtgtctgcccttttcagagagaatttgaacaagctgatgaccaacctcaggagtacccatcctcactttgtgaggtgtatcatccccaatgagacaaaaactcctggtgccatggagcatgagcttgtcctccaccagctgaggtgtaacggtgtgctggaaggcatccgcatctgtaggaaaggatttccaagcagaatcctttatgcagacttcaaacagagatacaaggtattaaatgcaagtgcaatccctgaagggcaattcattgatagcaagaaggcctctgagaagctccttgcatccatcgacattgaccacacccagtataaatttgggcacaccaaggtctttttcaaagctggtcttctggggctcctagaggagatgcgagatgacaagctggcccagctgattacccgaacccaggccaggtgcagagggttcttggcaagagtggagtaccagaggatggtggagagaagggaggccatcttctgtatccagtacaatatcagatccttcatgaatgtcaagcactggccctggatgaaactcttcttcaagatcaagcctctgttgaagagtgcagaaactgagaaggagatggccaccatgaaggaagaatttcagaaaattaaagacgaacttgccaagtcagaggcaaaaaggaaggaactggaagaaaagatggtgacgctgttgaaagaaaaaaatgacttgcagctccaagttcaggctgaagccgaaggcttggctgatgcagaggaaaggtgtgaccagctaatcaaaaccaaaatccagctagaagccaaaatcaaagaggtgactgagagagctgaggatgaggaagagatcaatgctgagctgacagccaagaagaggaaactggaggatgaatgttcagaactcaagaaagacattgatgaccttgagctgacactggccaaggttgagaaggagaaacatgccacagaaaacaaggtgaaaaacctcacagaagagatggcaggtctggatgaaaccattgctaagctgaccaaggagaagaaggctctccaggaggcccaccagcagaccctggatgacctgcaggcagaggaggacaaagtcaacaccctgaccaaagctaaaatcaaacttgaacaacaagtggatgatcttgaagggtccttggagcaagaaaagaaacttcgcatggacctagaaagggctaagaggaaacttgagggtgacttgaagttggcccaagaatccataatggacattgaaaatgagaaacagcaacttgatgaaaagctcaaaaagaaagagtttgaaatcagcaatctgcaaagcaagattgaagatgaacaggcacttggcattcaattgcagaagaaaattaaagaattgcaagcccgcattgaggagctggaggaggaaatcgaggcagagcgggcctcccgggccaaagcagagaagcagcgctctgacctctcccgggagctggaggagatcagcgagaggctggaagaagccggtggggccacttcagcccagattgagatgaacaagaagcgggaggctgagttccagaaaatgcgcagggacctggaggaggccaccctacagcatgaagccacagcggccaccctgaggaagaagcatgcagatagtgtggccgagcttggggagcagattgacaacctgcagcgagtgaagcagaagctggagaaggagaagagtgagatgaagatggagattgatgaccttgctagtaatgtagaaacggtctccaaagccaagggaaacctagagaaaatgtgccggactctagaggaccaactgagtgaactgaaatcaaaggaagaggagcagcagcggctgatcaatgacctgactgcgcagagggggcgcctgcagactgaatctggtgagttttcacgccagcttgatgaaaaggaagctctggtgtctcagttatcaagaggcaaacaagcctttactcaacagattgaagaattaaagaggcaacttgaagaggagataaaagccaagaacgccctggcgcatgccctgcagtcttcccgccacgactgtgacctgctgcgggaacagtatgaggaggagcaggaatccaaggccgagctgcagagagcactgtccaaggccaacaccgaggttgcccaatggaggaccaaatacgagacggacgccatccagcgcacagaggagctggaggaggccaagaagaagctggcccagcggctgcaggcagctgaggaacatgtagaagctgtgaacgccaaatgtgcttccctcgaaaagacgaagcagcggctgcagaatgaggtcgaggacctcatgcttgatgtggagaggacaaatgccgcctgtgccgcccttgacaaaaagcaaaggaacttcgataagatcctggcagaatggaaacagaaatgtgaggaaacgcatgctgagcttgaggcctcccagaaggaggcccgttcccttggcactgagctgttcaagataaagaatgcctatgaggaatctttggatcagctagaaaccctgaagcgagagaacaaaaacttacagcaggagatttctgacctcacggaacagattgcagaaggagggaaacgtatccatgaactggagaaaataaagaaacaagtggaacaagaaaagtgtgaacttcaggctgctttagaagaagcagaggcatctcttgaacatgaagagggaaagatcctgcgcatccagcttgagttgaaccaagtcaagtctgaggttgataggaaaattgctgaaaaagatgaggaaattgaccagctgaagagaaaccacattagaatcgtggagtccatgcagagcacgctggatgctgagatcaggagtaggaatgatgccattaggctcaagaagaagatggagggagacctcaatgaaatggaaatccagctgaaccatgccaaccgcatggctgctgaggccctgaggaactacaggaacacccaaggcatcctcaaggatacccagatccacctggatgatgctctccggagccaggaggacctgaaggaacagctggccatggtggagcgcagagccaacctgctgcaggctgagatcgaggagctgcgggccactctggaacagacagagaggagcagaaaaatcgcagaacaggagctcctggatgccagtgagcgtgttcagctactgcacacccagaacaccagcctgatcaacaccaagaagaagctggagacagatatttcccaaatgcaaggagagatggaggacattctccaggaagcccgcaatgcagaagaaaaggccaagaaggccatcactgatgccgccatgatggctgaggagctgaagaaggagcaggacaccagcgcccacctggagcggatgaagaagaacatggagcagaccgtgaaggatctgcagctccgtctggatgaggctgagcagctggccctgaagggtgggaagaagcagatccagaaactggaggccagggtacgggagctggaaggagaggttgagagtgagcaaaagcgtaatgctgaggctgtcaaaggtctgcgcaaacatgagaggcgagtgaaggaactcacttaccagacggaagaagatagaaagaatattctcaggcttcaagatttggtagataaacttcaggcaaaagtgaaatcttataagagacaagctgaggaggctgaggaacaatccaacaccaatctagctaaattccgcaagctccagcatgagctggaggaggccgaggaacgggctgacattgctgagtcccaggtgaacaaactgcgggtgaagagccgggaggttcacacaaaagtcataagtgaagagtgatcatgtcctgatgccatggaatgactgaagacaggcacaaaatgtgacatctttggtcatttccctctgtaattattgtgtattctaccctgttgcaaaggaaataaagcatagggtagtttgcaaacaataaaaaaaaaaaaaaaaaaaaaaaaaaaaaaaaaaaaaaaaaaaaaaaaaaaaaaaaaaaaaaaaaaaaaaaaaaaaaa

SEQ ID NO: 411 - DNA, 4120 bp, Artificial Sequence
  RAPGEF4
cttttaaaccaagcggaagcctgcttcgatgacttggacttatgtctgcaccagggtctcattcctgtgtcttcaagcttttccatggagtggcaaaatgattcaaatccagaaaggaagggagtgaagttattaggagctaactaaagttaaaaaaaaaaaaaaaaaaaaaaaaggaagtgttttcttattgccttagactgcctgagctttcctggagaaccatcagcaccagtttcctttctgtggactgagagccactcagtagtagacacgaacagggaatgaacggcaatgaaggtacattttgctgatcaaataaaggatagatgctcactggatgtctgagaactttgagagaccgaaaaagaaggacgtatgctctacaagaaatatcgacagtatatggcaggacttctggctcctccttatggtgttatggaaacgggctctaacaatgacaggattcctgacaaggagaacacacctctcattgaacctcacgttcctcttcgtcctgctaacaccattaccaaggtcccttcagagaagatcctcagagctggaaaaattttacgaaatgccattctctctcgagcacctcacatgataagagatagaaaataccacctaaagacatacagacaatgctgtgtgggaactgaactggtggactggatgatgcagcagacaccatgtgttcactcccggactcaagctgttggcatgtggcaagtcctgttagaagatggtgttctcaaccacgtggaccaggagcaccatttccaagacaaatatttattctatcgatttctggatgatgagcacgaggatgcccctttgcctactgaggaggagaagaaggagtgtgatgaggagctccaggacaccatgctgctgctgtcacagatgggccccgacgcccacatgaggatgatccttcgcaaaccacctggccagaggactgtggatgacctagagattatctatgaggagcttcttcatattaaagccttatcccatctttctaccacagtgaaacgagagttagcaggtgttctcatttttgagtctcacgccaaaggagggactgtgttgtttaaccagggggaagaaggtacctcctggtacattattctaaaaggatcagtgaatgtagtcatttacggcaagggtgtggtctgcaccctgcatgaaggagatgacttcggcaagttagcactagtgaatgatgccccacgagctgcctctatcgtcttacgagaagataactgccatttcttaagagtagacaaggaggatttcaaccggatcctaagggacgtggaggcgaatacagtcagacttaaagaacatgaccaagatgtcttggtgctggagaaggtcccagcagggaacagagcttctaatcaaggaaactcacagcctcagcaaaagtatactgtgatgtcaggaacacctgaaaaaattttagagcattttctagaaacaatacgccttgaggcaactttaaatgaagcaacagattctgttttaaatgactttattatgatgcactgtgtttttatgccaaatacccagctttgcccggcactggtggcccactaccacgcacagccttcacaaggtacagaacaggagaaaatggattatgccctcaacaataagaggcgagtcatccgcctggttctacagtgggctgccatgtatggagacctcctgcaagaggatgacgtgtctatggccttcctggaggagttttatgtatctgtatcagatgatgcccggatgattgctgccctcaaggagcaactgccagagttggagaagattgtcaagcaaatctcagaagatgcaaaggcaccacaaaagaagcacaaggttcttttgcaacagttcaatacgggcgatgagagagcccagaagcgccagcctatccgcggctctgatgaagttctgtttaaggtctattgcatggaccacacctacacaaccattcgggtgccagtggccacttcggtgaaggaagtcatcagtgcagttgccgacaagctgggctccggggagggcctgatcatagtcaagatgagttccggaggagaaaaggtggtgctcaaacctaatgatgtttcagtatttacgacgctcaccattaatggacgcctgtttgcttgcccgcgagagcaattcgattcactgactcccttaccagaacaggaaggcccaactgttggaacagtgggaacttttgaactgatgagctccaaagatttagcataccagatgacaatttatgattgggaactcttcaactgcgtgcatgagctggagctaatctatcacacatttggaaggcataattttaaaaagaccacagcaaacttggatttgttcctgaggagatttaatgaaattcagttttgggtcgtcactgagatctgcctttgttctcagctcagcaagcgtgttcagctattaaaaaaatttattaagatagcagcccactgtaaggagtataaaaatctgaattccttttttgccatcgtcatgggactaagtaacgttgctgtgagccgcttggcactaacgtgggagaaactgccaagcaagttcaagaagttctatgcggagtttgaaagtttaatggacccttcaaggaaccacagggcctacaggctgacagtagctaagctggaacctcctctcatccccttcatgcctttgctcattaaagatatgacatttactcatgaggggaacaagacgttcattgacaatctagtaaactttgaaaaaatgcgcatgattgcaaatacggccagaacagtgagatactacaggagccaacccttcaatcctgatgcagctcaagctaataagaaccatcaggatgtccggagttatgtacggcaattaaatgtgattgacaaccagagaactttatcacagatgtcacacagattagagcctcgtcgaccatagacatttcaaatgcccaaagcaacagtttgtctccagtccacaatctttcaaaaatgccatttatgctactactgactgtattgccactagagaattctacaaaacaagcaaaaacacatcctgagacacctcagggctgcattcagcttaccagctacctagcaagagaaggaattatttgacatgcctaaagcttacacactctagcttaggaatccccagtttgtggctaccctgtttcatttccacttgtgccatcttctttgctgaagtgttgaataaggcccacgtgaagagtttggtagaaatagccttgtcaagagaactagcaagcccctgacatttttttctaagagtgtttatgggatgagatgtgctacaaatgggatagatttggataaaattttaactcaacatcttgatttggagcctggggtttcgggaaggtgttgaggaatctatagaagtccaaattataggttgtattcttccatcttcattgtcttacctctgaaggaatagaacctgaccacattattatgaaacattatggctgtttatgtaatttagggaggactggtctgtaatttctgaatgtatatagaataatatttatgtttacaatgtaacttttcaaaatttacaaatcaggattatatacataagaattccactaagaaatgccaagattcttaaatttgccagcgttaaagtagaaaataacatttcagaagagcacaatatgcataaaacatttttcaaaattgaaatattttcctgggcattaaaaacctttactattggctacaaatttattgtacctgatgaaaacatattttctggacttaaatgttattacaaatatcttaattttcagtaattgttttgcactttcaaagattgtaaatagttcattcaatcaatggtatagagttatttatttgctacataatagatactgtgccaaataattactttttatttattttatttagtacgtaattttgaagtacattttttcctgttttcacaattagactacatttaatgtgtaggaattgtatgtatgtatatcttctgtaaataacatctagtatcttcactaaatataattgtcgacaagaaaaaaaaaaaaaaa

SEQ ID NO: 412 - DNA, 3503 bp, Artificial Sequence
  PNMA8A
agtgcgcaggcgcgcgctgcgacgccaacctcggcttctcgccgctaacggcatcgagtctggacgccccgtgacccgcctgggccggagcgggggcggacggcgccttcttggccctttctgcctctagcagcggcgccggggtagccggagccagcgactgggaaacggctgcattccactgcgtctccttggcctggctgggcggtcggaggctgatctgccaagattactgtttggagaccgctgcagcccacgtccacctgatagactatttactacacatagtaggttcagagccgctaaatgtccaagaccatggcgatgaaccttctggaggattggtgcaggggaatggaagtggacatccacaggtccttgttggtcacaggcatcccagaggactgtgggcaggcagaaattgaggagaccttgaatggggtcctctccccactgggcccgtaccgcgtgctcaacaagatttttgtgagggaagagaatgttaaagctgccctcattgaggttggtgaaggtgtgaatctgagcaccatcccccgtgaattcccaggaaggggtggtgtctggagagtggtctgtagagaccctacccaggatgccgagtttttaaaaaatctgaatgaattcctggatgccgaggggcgcacctgggaggatgtggtccgcctgctccagctcaaccaccccaccctgtcccagaaccagcatcagcccccagagaactgggcagaagctctgggggtgcttctgggagcagtggtgcagatcatcttctgcatggatgccgagatccgcagccgggaggaagccagggcccaggaggccgctgaattcgaggagatggcagcctgggctttagcagcagggaggaaggtgaagaaagaaccggggcttgcagcagaggtgggttctgccttaaaggcagagacccccaacaactggaatgccacggaagaccagcatgagcctaccaaacctttggttcgcagggctggagctaagtctcgctccaggagaaagaagcagaagaagaactccaggcaggaagcagtgccctggaaaaaacccaaaggcatcaattccaacagcacagctaacttggaggatcctgaggtgggtgatgctgaaagcatggcgatctcagagccgatcaagggcagcagaaagccctgtgtgaataaggaggagttggctttgaagaagcccatggcgaaatgtgcctggaagggtcccagagagccacctcaggatgcccgggcagaagccgagagcccaggaggcgcctctgagtcagaccaagatggtggccatgaaagcccaccaaagaagaaggccgtggcctgggtgtctgccaagaaccccgctcccatgaggaagaagaagaagaatccagaaaggtttgatctgggggaccacccatactgaggagttgaaagaacaaggaagaagtaccaagtcaaccaagttctctcttgtcactgaataagactttggactctcttagggcccctgttgatagagatctggccctgaggtaaacgataggtgaggtcttgggtgggagggagttggggaagggaggtggatctctatgcccttttctctaccaggcctgccgtttcaccgccttctctactcaccttctcttcggaggcaggagagttggtaagaggattgggaaaattctagaacattcattcccctttatgcatgagcagggtcactgttacactcatccatgttcagcttttctcccccacgccttgctccctcctcggaatggtcagcgacctctgcaggccctggcatttggaagagctgggtggccctgccatattcttcctcccgccttcctctcgtgtaaccagcggggtaagttaagccaggaccttcgctgcaaacctggttttattgctccttcagtctccagcttccatcctccagttatctagccaggaggtcccaagagttagttttagggaaaaagaatgtctgcctagacctcaaagtctttgagttttagagtctgttagtaaaaatggcactttgattcccatttgggatgagccctctcaggaatcctgtggggaaggggggtgattatagggaaggacgcaggcattcctaggtccccagctctaattccatccatctacccaactgtcaccatctttgcaccaaactgtcaccatctttgcagcagaaggtcactactcacattatagtaagaggggaaaaaaatcttttaaaacttggctgttggccgggcacggtggctcacgcctgtaatcccagcactttgggaggctgaggcaggtcgatcacgaggtcaggcgtttaagaccagcttgaccaacatggtgaaaccccatctctacaaaaattagctgggcgtggtggcgcgcgcctgtaatcccagctactcaggaggctgaggcagatgaattgcttgaatccaggaggcagaggttgcaatgagccgagattgtgccacggcactccagcctgggcagcagagtgagactctctctcaaaaaaacaaaacttggctgttaatgtctgccctctgaattcagacacactatattagaccagaccaccatgtgtcattgtgtgtgtgtgtgtgtgtgtttgcgtgcgcatgtgtagaggagagagcagggtccctgagataatggtttccaaactgtatcgtagccgtccacaaagatgtaatccaaatctatttttctcacgtgtttaaaaaactgaaaagtgactactcagatatgttggaagtcacatcgaagactatcagaatattaccttgtgttcataggttaacttgtttttgtacacgtcttagttatttcaggcatctctttgcttaaaattgagtttcttgtaaatgtgactgatgagcgaggttagaagtggaagaaattcctgtgcatgttctataatctgacaccctgaaagcaagtttcctttcgtcattcacatgctcttgttctgccgtgactgttcaggtgtatggtagtaagtaaatgtattaacatggtgaacagtagtaatattctatcatagagtattagcccttgcaagttttcagggcgtcttttccgacttcagtttttgtgataaagaatgtgaacagttgttagatgttctcagtgattcaactttaaaacaaatttctcgtgatgattcatttcaaaatcctgagtgagtctgactgaaaaatacgagagaaaagagagtggtttccgtttgcagctacacagctgtgtgcatcgacgttctcctggggtgtgtgccaagcgaaacccaggggtgaattggattcttgaagagaccaaagcctgtaactgtccagcttctaatttcaaaacgggtccattagggcttcgttgtgttaacaagttgacaccatgactagtaaatgtaaacgtgtatgtataaaataaagtttagcaaattaagtgtcctgttaaaaaaaaaaaaaa

SEQ ID NO: 413 - DNA, 2514 bp, Artificial Sequence
  NEFM
gtgcccaggcgccctctccgccgcgctccctggtggccgctcgctagagcacgcgcgccgcagacctagggtatttgcggatcagcgtcctcgcccatctcatcctccacactccgcccccacccacctgccccagctgctaagggtcttgacctttttcagaaacgtgcatcttttccagttctaattttgcacgcttgcacgtttaaagcaggagggatgaattcggtagtggataaatcagcaactttaggatagcttatgcagaaacgcgtgtattctctacttttccggcagtgatcggaagagctctcaaaattggcttcagcccaaagggctcagatgggaatggccaggacaccatccagcagctggaaaatgagcttcggggcacaaagtgggaaatggctcgtcatttgcgcgaataccaggacctcctcaacgtcaagatggctctggatatagaaatcgctgcgtacagaaaactcctggagggtgaagagactagatttagcacatttgcaggaagcatcactgggccactgtatacacaccgacccccaatcacaatatccagtaagattcagaaacccaaggtggaagctcccaagcttaaggtccaacacaaatttgtcgaggagatcatagaggaaaccaaagtggaggatgagaagtcagaaatggaagaggccctgacagccattacagaggaattggccgtttccatgaaggaagagaagaaagaagcagcagaagaaaaggaagaggaacccgaagctgaagaagaagaagtagctgccaaaaagtctccagtgaaagcaactgcacctgaagttaaagaagaggaaggggaaaaggaggaagaagaaggccaggaagaagaggaggaagaagatgagggagctaagtcagaccaagccgaagagggaggatccgagaaggaaggctctagtgaaaaagaggaaggtgagcaggaagaaggagaaacagaagctgaagctgaaggagaggaagccgaagctaaagaggaaaagaaagtggaggaaaagagtgaggaagtggctaccaaggaggagctggtggcagatgccaaggtggaaaagccagaaaaagccaagtctcctgtgccaaaatcaccagtggaagagaaaggcaagtctcctgtgcccaagtcaccagtggaagagaaaggcaagtctcctgtgcccaagtcaccagtggaagagaaaggcaagtctcctgtgccgaaatcaccagtggaagagaaaggcaagtctcctgtgtcaaaatcaccagtggaagagaaagccaaatctcctgtgccaaaatcaccagtggaagaggcaaagtcaaaagcagaagtggggaaaggtgaacagaaagaggaagaagaaaaggaagtcaaggaagctcccaaggaagagaaggtagagaaaaaggaagagaaaccaaaggatgtgccagagaagaagaaagctgagtcccctgtaaaggaggaagctgtggcagaggtggtcaccatcaccaaatcggtaaaggtgcacttggagaaagagaccaaagaagaggggaagccactgcagcaggagaaagagaaggagaaagcgggaggagagggaggaagtgaggaggaagggagtgataaaggtgccaagggatccaggaaggaagacatagctgtcaatggggaggtagaaggaaaagaggaggtagagcaggagaccaaggaaaaaggcagtgggagggaagaggagaaaggcgttgtcaccaatggcctagacttgagcccagcagatgaaaagaaggggggtgataaaagtgaggagaaagtggtggtgaccaaaacggtagaaaaaatcaccagtgaggggggagatggtgctaccaaatacatcactaaatctgtaaccgtcactcaaaaggttgaagagcatgaagagacctttgaggagaaactagtgtctactaaaaaggtagaaaaagtcacttcacacgccatagtaaaggaagtcacccagagtgactaagatttgagtccattgcaaaaggttaagccatatgacaatttcaaaatgcatgtgattggcagcttcaaaacagaacgggttctcccatgggggctccagacattgtattttactttgtgcaatatgaggggactgcatgcaagctcagggtgctccctcctcagtctttgggggattcaaatgcatgatattgtatgtacctgggaaatttgccgatttcctaagctgttggaagggggtcacttaaggggggatgtcttgagatgtattatgcaaagtaccaactgagccaaaaacaataaacgaaacacagaactcagccttaagaaagctatatatgaataattatgtttacctcactggtgcatttaaaatggacttttgttcatgggagaacctcgttgacatgcacagtttgcaatcttatgttgatcgatgttaaacgtcacagcagtacttgctcaataaaggtcatattggaaacata

SEQ ID NO: 414 - DNA, 3177 bp, Artificial Sequence
  PRH2
agcataaagttgggagtgacaccagagccttctgcaagatgcttctgattctgctgtcagtggccctgctggccttcagctcagctcaggacttagatgaagatgtcagccaagaagacgttcccttggtaatatcagatggaggagactctgagcagttcatagatgaggagcgtcagggaccacctttgggaggacagcaatctcaaccctctgctggtgatgggaaccagaatgatggccctcagcagggaccaccccaacaaggaggccagcagcaacaaggtccaccacctcctcagggaaagccacaaggaccaccccaacagggaggccatccccctcctcctcaaggaaggccacaaggaccaccccaacagggaggccatccccgtcctcctcgaggaaggccacaaggaccaccccaacagggaggccatcagcaaggtcctcccccacctcctcctggaaagccccagggaccacctccccaagggggccgcccacaaggacctccacaggggcagtctcctcagtaatctaggattcaatgataggaagtgaataagaagatgacagtgtttcaaatgccttgaaacataatgtgatcatgctctaacttcaatataccaataaaataatcagcttgcaatttctgattatagcatctccttctgagtgtttgggactctggaatctgagacccatgttcacattgtaagaacatccaggaccccttctccttgatgtttccagcaagcttctttcctccttatccttattaagtcatctgcctggggaaggagttccactgtttctttccttctctgtcttcttagctcgaatttaaattgcacaattattttcaggtcatttcctgatagtctagtcagcttatgaatgtaagcaaaacaggaccaatgaaagaaagtcccagaagctgagagaaactttaacaagtttgagagtaacttattttgttttctaggaaagtgagtatggttctatgcctgtattccccagaagccactagacctattttcccctattttatcactgatcagttctgtccctgcctatgattcttaccattcttaagaaaacctgaatggatttcatcaaggcggcagcataatttgaagggcaattgcgtgtgaaaattgatgtgacttgatttacacaatagtcagaaaacattttagaaattgatgactttataatgcaaccaggagtattgaaaaaaaagtaagcaatgagctcaaataattaaaaaagagagacaaaatacacttgggagaacagaaataagaattaatgaaaatttaaaagattaaatgaatgagaagaaatgattcataaattttgaactaacagtaataacttcttgaaaatccaataaaattggcaaaagattgtgaaaattctggaagaataagggaaacagataatcttcagagtaatcaggtaaagcttaaacaagtgttttaaaagatgagtttttcctacattctgaaaagcaaacatgaaaaactgaacacagtttttacagatatacaatatggagtgacttatatacaaaatgaccttaaaaatatattaaactcattatagtagttaatatctaagtaaaatatgatgaaatttaatagagaattcactcctcccaaaagcaccttcatggaagattcctcattaacaggcagtcctttagtatgctgatttatacaaaatgctgaaaagaagagaaataccccaagttcttgaaaaaaaattttttgatatgactactctaacagtaataactataaatctcactttaaataatttaaaacaaattaaagtgatatatgagttaaatgaccaagcagacttgattccaggaatgttaaggaatgttcattatttgttttggataatgaagtcagcagaggaaaaaaaaatatgaccatctcaaaagatgccaacgttgtctttgataatatttaatatattttttaaaaaacaattcttgtaaaatacttttttgattagccttctgaccatgattaaaatggtgtacctcaaagtagctgctaaccttatgtgtatctgcaacaccctgaaaaattatctaataaaaaggcacaaagaaaaagcttgtcaatgttgtggataattagaaagtgaataattttatttaatattagataaacaagcacataacagagatacatatattcaaatggaaggagtaaaattaccaccacatgcagatctgtttttctgtccagaaaataacaagagattctactcaggtaaaaaaggaaaggaaggaaaaccattgtaattaaaataaaatttaatacaatagccgtttattaattcaacttctaaagaatctttgtgattacacaatgaccagctagtaaatataataagaaaatgattattcacaaaggaaccaaaaggcctagtcttcgaatttttaatgccattgtgatagcaagcatctgattattttactctaagttatttccacttctgattttaagaacagcttctttcccagggatgggttccccctagtgatgtattctcttcaccacaagagtttgcagctctggctttctttctgctcatctgtaaagataactacagctcctctataaaccatctcaccattattaccgaaatcagacaaattctggagatagtcaaagctgtgaggattcgaagatctctttcacatcttgacccagtcaattccgttcaccagtgttatgaatccattccccaaaattccaattaggaattatatatttattattataatgaggatactatacaaggcatttagcatggctgcaaagagagagctccaatgtctaaatgcaacgctgacaatttcttcatctatcacatgtacctgttatacatacttattaattggatgtgcagttaatttcttcctttaaaaaaaaaactataggctcaatatgaaagtagaaagcactaaggtgtactaatgaatgggcacatagcttttttcacaaaaagattattttgccccagacagctatctgcattctgatccagatactgtatgttcttaacataaagtgaaatttctcatacttcatgatgaaagaaaaaactgaattctcattgttaataaacaaataaagacaattctctgca

SEQ ID NO: 415 - DNA, 1833 bp, Artificial Sequence
  NAA16
aaagggcgctccgcgcatgcgcacaggatccggctcgggaggcggaccctggctgccatcttgcagtgcgcgggaaccgccgccgccgccgctggccaaaaagcggagcccaggggaagcgtgtcctgctcagaccgccttccttctccattgccacccgtgccgaacagccaggctgcccaattgcaactgtagaccaatgaactaatccatcgcccgcagcccgactctcagcagcggttcgtcccggtgcccacccccgcgaagcggagcgcccgggcacctagcctccctgccggccacctagcctccctgccggccacgatgccgaacgtgctgctgccgcccaaggagagcaacctcttcaaacgcatcttgaaatgttatgaacagaagcagtacaaaaatggcctcaagttttgcaagatgattctgtcgaacccaaaatttgctgaacatggagagactttggctatgaaaggattaacactgaactgtttaggaaaaaaagaagaagcttatgagtttgttcgtaaaggacttcgtaatgatgtcaagagtcatgtctgttggcatgtatatggactcttgcagcgttctgataaaaaatatgatgaagctataaaatgttaccgaaatgccctcaaattagataaagataacctgcaaattttgagggatctctcactgttgcagatccaaatgagagaccttgaaggttaccgagagacaagataccagcttcttcagttgcgccccacacagcgtgcctcctggattggatatgctattgcataccatttgctgaaagattatgatatggccctaaaactgttggaagaatttagacaaactcagcaagttcctccaaacaaaatagattatgaatatagtgaattgatattataccagaatcaagtgatgagagaggcagatctgttgcaggaatctttggaacatatagaaatgtatgagaaacaaatatgtgataaacttttggtggaagaaattaaaggggaaatactgttgaaattgggaagattaaaagaagccagtgaagtgttcaaaaacttgattgatcgaaatgcagaaaattggtgttattatgaaggcttggaaaaagctctacaaattagcactttagaagagaggcttcaaatttatgaagaaattagtaagcagcaccccaaagcaattacacccagaagattacctttgactcttgtcccaggtgaaagatttagagaactaatggataagttcctgagggttaacttcagtaaaggctgcccacccttgtttactactttgaaatctttatattacaatacagaaaaggtttctataatccaggaacttgttactaattatgaagcctctcttaaaacgtgtgacttttttagcccatatgagaatggggagaaggaacccccgacaacactactctgggttcagtatttcctggcacagcactttgataaacttggacagtattctttggctttggattatattaatgctgcaattgctagtactccaactctaatagaattattctatatgaaagcaaaaatttacaaggtaaaatctgaatcctgttttttgagtagttgaagaattcagctactttaagaatccttggagttttttctttgtggaaacaagttctagggcaccctgataatctttttctaataatcctgtgtagtttcatgttatattaattgtataatcaatgtgtaattagatgtgtaatcatttgagctcttagtaaatgtgaactgtaattttgatttctaaataaatttgacagaaatggtgacagaaaaaaaa

SEQ ID NO: 416 - DNA, 6038 bp, Artificial Sequence
  SLC8A1
taggttgtgacagttggaagtgtcatgtacaacatgcggcgattaagtctttcacccaccttttcaatgggatttcatctgttagttactgtgagtctcttattttcccatgtggaccatgtaattgctgagacagaaatggaaggagaaggaaatgaaactggtgaatgtactggatcatattactgtaagaaaggggtgattttgcccatttgggaaccccaagacccttcttttggggacaaaattgctagagctactgtgtattttgtggccatggtctacatgtttcttggagtctctatcatagctgatcggttcatgtcctctatagaagtcatcacatctcaagaaaaagaaataaccataaagaaacccaatggagagaccaccaagacaactgtgaggatctggaatgaaacagtttctaacctgaccttgatggccctgggatcttctgctcctgagattctcctttcagtaattgaagtgtgtggccataacttcactgcaggagacctcggtcctagcaccatcgtgggaagtgctgcattcaatatgttcatcattattgcactctgtgtttatgtggtgcctgacggagagacaaggaagattaagcatttgcgtgtcttctttgtgacagcagcctggagcatctttgcctacacctggctttacattattttgtctgtcatatctcctggtgttgtggaggtctgggaaggtttgcttactttcttcttctttcccatctgtgttgtgttcgcttgggtagcggataggagacttctgttttacaagtatgtctacaagaggtatcgagctggcaagcagagggggatgattattgaacatgaaggagacaggccatcttctaagactgaaattgaaatggacgggaaagtggtcaattctcatgttgaaaatttcttagatggtgctctggttctggaggtggatgagagggaccaagatgatgaagaagctaggcgagaaatggctaggattctgaaggaacttaagcagaagcatccagataaagaaatagagcaattaatagaattagctaactaccaagtcctaagtcagcagcaaaaaagtagagcattttatcgcattcaagctactcgcctcatgactggagctggcaacattttaaagaggcatgcagctgaccaagcaaggaaggctgtcagcatgcacgaggtcaacactgaagtgactgaaaatgaccctgttagtaagatcttctttgaacaagggacatatcagtgtctggagaactgtggtactgtggcccttaccattatccgcagaggtggtgatttgactaacactgtgtttgttgacttcagaacagaggatggcacagcaaatgctgggtctgattatgaatttactgaaggaactgtggtgtttaagcctggtgatacccagaaggaaatcagagtgggtatcatagatgatgatatctttgaggaggatgaaaatttccttgtgcatctcagcaatgtcaaagtatcttctgaagcttcagaagatggcatactggaagccaatcatgtttctacacttgcttgcctcggatctccctccactgccactgtaactatttttgatgatgaccacgcaggcatttttacttttgaggaacctgtgactcatgtgagtgagagcattggcatcatggaggtgaaagtattgagaacatctggagctcgaggaaatgttatcgttccatataaaaccatcgaagggactgccagaggtggaggggaggattttgaggacacttgtggagagctcgaattccagaatgatgaaattgtcaaaacaatatcagtcaaggtaattgatgatgaggagtatgagaaaaacaagaccttcttccttgagattggagagccccgcctggtggagatgagtgagaagaaagccctgttattgaatgagcttggtggcttcacaataacaggccaacctgtcttcaggaaggttcatgctagagaacatccgattctctctactgtaatcaccattgcagacgaatatgatgacaagcagccactgaccagcaaagaggaagaggagaggcgcattgcagaaatggggcgccccatcctgggagagcacaccaagttggaagtgatcattgaagaatcctatgaattcaagagtactgtggacaaactcattaagaagacaaacctggcccttgtggttgggactaacagctggagagaacagttcattgaagctatcactgtcagtgctggggaagatgatgacgacgatgaatgtggggaagagaagctgccctcctgtttcgattacgtgatgcactttctgactgtgttctggaaggtcctgtttgccttcgtcccccctactgaatactggaatggctgggcgtgtttcattgtctccatcctcatgattggcctactgacagctttcattggagacctggcttcccactttggctgcaccattggcctgaaagattctgtgactgcagtcgtgttcgtcgcacttggaacatcagtgccagacacatttgccagcaaagtggcagccacccaggaccagtatgcagacgcctccataggtaacgtcacgggcagcaacgcggtgaatgtcttcctgggaatcggtgtggcctggtccatcgctgccatctaccacgcagccaatggggaacagttcaaagtgtcccctggcacactagctttctctgtcactctcttcaccatttttgctttcatcaatgtgggggtgctgctgtatcggcggaggccagaaatcggaggtgagctgggtgggccccggactgccaagctcctcacatcctgcctctttgtgctcctatggctcttgtacattttcttctcctccctggaggcctactgccacataaaaggcttctaaaggaactatcagatatagtaaatttatatatatacatatatatacataaaaattatgtataatggacagaggaaactgacatttgtcatgttcacttacctgctgatggaatccagcttcaagagcatactctgtactagggccgaagtaaaaaaccatcacctcccattcccaggggcatcatcatgttcaacaaggcatggaggcagggccatctttgcagctcagtctagaagggctgcactctctccaggttgataaatccttaaggctttgatttgttttgtttttggttttgttttcagtggagctggggaggtagttaatgtttggctttatttttgttattttgttttgttttgtttttttgggagagtcagggttgttgcttttctttgtggaaagtgaaaccatccaaatgtaaatgggttttggtaaaaatttaaatcattagtattccccctcacctcccccaatcactttaaaacttattttggattaagaaaaaatctgggcatggaagaagaaagaagcatgtcttcatcgtattaccaaagttcatgcttatctccggaatgtgagtggaggtgaagctgcctccaagaagaagcataaaagtggaatggagccaggaaatccgatggttctagaaatagtctgatatttaaacatgtgatacctggcagtctcgtttaacaggtacaaggaaaacgtgcctagattcccaggaacgtgcaaaatcctttctttcttatctctttagctctggactgtgattggcaaggtccttcttccagcattcagcccagctaagcccccaggtgccccatcccaaccctgttcctcctgtccacctgccatcccctatgcaaacagtaagaataaccccattcaaaaagcacatcatcgttttccatttgcattaacatgtgtctcagtcccatgttgccgttgcttgggattgtctgtcagttttattttcaaaggcatccatggcttgcacaatcctgttccagtcatgactgaacatttgctccttcttcatgtgccgttcggaaatgttgttgtgatacctgttacacagtgcatggtgaaaaacaaataaaacaaaacaaagagtatctgtatatagtagagtatagtacatactgttctcccatttggcaatgttgattggacattgaagacataagtgagttttcttttcacctgagttgttacttttgtgctgttattgagtttgattaattactagggataaaaggagaaaatggattattgttcacggttctgcacattcatttctaagaagcaataactgtcatgtggggagaagttaaagctattgagaggatagcaggcaaactacaaagatcttcatggaaaattagccatgtggaacacatcagaggcctctaaaaatcacccattaattcaggaaggccaaggagaaaggccttatagagacgttgatatgttggatgtgcctaggctttcagagccaccctttccacaacacccctccctgcaaagtatttatttcacatctgcactgtctggcacagatggtagatagtgctggtttgttcattttatttttttacttaaaaggctattttgagccctgtttctttcactgtccagtctagtcctctttgattatatcagtagttgctgagtaagaaagaagccagggtgaccaacgggcctttaaaagtgttgtctcctctacttatgctgaaagagaaggcaattaaataagactagtacctcccaggaggattggactgggatatttttaaccctttaaaaagaatagctgtttctatgttaaaataccaaagaacatggataaacccaacattccaaagtagtgagtccactaatgagaaaaataatagaatgactttggtcacctctcggagacttctgtgtctataaggaatcccaggctggagacattcctagccctctgtattgattcaaaaatacttaataaattaaagctgttgagacttattttttcttctgtcactcagtaaccatgatccttcctcatttaataaacatttggtgactgaatgagtaattaaatgctggttacccacttaatgtgccaggtagtatgatactttctggggactaagccatgaacaaaacagtctagatccctgccctcagaagggttacagtttatgtgattactattttcatgagtaaaagtgaagaaagccatatggaaagatttttatcttgcaagaaaaaacaattatgaaactcttttaacataaacacactgaaactgtatcaaagcaattgtccaaattgtatttatacccaagaatttctttaactaagagagcataaggcatatgtttggaaaaccaccctctttatctttgaccgacttgcagataaatatatctctccattttaaaccaagaagggcaatcatgttggtgatccagatcactgagaaagcccagtgtatcccatcttttatctttgttggcaatggaacttttctatggcccacactttacaattctttgtcattctaacccatccttcccatccttattttttttttttttgagaattgctaaatggaaagctagcctagaagcaccaagtaaatatattcaaggaatataagttgtttaaacattagaaaaatttttgcactcattttttagctgtattaggaatgtcaataatcctgtagcaaattttcacagagaactttaagaaattcttgcattggtcgatttcaatttgaaagctttttggtttgtttgctttttaaattttcatgttctaggaaactatgattctggttgttcaggattgttattattatagttgtgtaaaattattttattttgtgtgtattgtgcacagcttggggggggggcgggaaatgcactaattgtgctcttccttataaatggtacatattactgacacagacaaataaagtttctaattgtttctgatttaatcactagtgatacagcatattctgtatgaaatgttttctcctttctcattgtcatctacttcattttttgttttcatgttttgaagaaataaaaaccaaaatggta

SEQ ID NO: 417 - DNA, 5988 bp, Artificial Sequence
  CLIC5
aagagctcgttgattcctctgcaaggtggtgcagcatcctctgtcccttcattcatttcagatctactcaggtctccctgtaaacagatctctcggatcaataagcatgaatgacgaagactacagcaccatctatgacacaatccaaaatgagaggacgtatgaggttccagaccagccagaagaaaatgaaagtccccattatgatgatgtccatgagtacttaaggccagaaaatgatttatatgccactcagctgaatacccatgagtatgattttgtgtcagtctataccattaagggtgaagagaccagcttggcctctgtccagtcagaagacagaggctacctcctgcctgatgagatatactctgaactccaggaggctcatccaggtgagccccaggaggacaggggcatctcaatggaagggttatattcatcaacccaggaccagcaactctgcgcagcagaactccaggagaatgggagtgtgatgaaggaagatctgccttctccttcaagcttcaccattcagcacagtaaggccttctctaccaccaagtattcctgctattctgatgctgaaggtttggaagaaaaggagggagctcacatgaaccctgagatttacctctttgtgaaggctggaatcgatggagaaagcatcggcaactgtcctttctctcagcgcctcttcatgatcctctggctgaaaggagtcgtgttcaatgtcaccactgtggatctgaaaagaaagccagctgacctgcacaacctagcccccggcacgcacccgcccttcctgaccttcaacggggacgtgaagacagacgtcaataagatcgaggagttcctggaggagaccttgacccctgaaaagtaccccaaactggctgcaaaacaccgggaatccaacacagcgggcatcgacatcttttccaagttttctgcctacatcaaaaataccaagcagcagaacaatgctgctcttgaaagaggcctaaccaaggctctaaagaaattggatgactacctgaacacccctctaccagaggagattgacgccaacacttgtggggaagacaaggggtcccggcgcaagttcctggatggggatgagctgaccctggctgactgcaatctgttgcccaagctccatgtggtcaagattgtggccaagaaataccgcaactatgatatcccggctgagatgacaggcctgtggcggtacctcaagaacgcctatgcccgtgatgagttcaccaacacctgtgcagctgacagtgagatcgagttggcctacgctgatgtcgccaaacgcctcagccgatcctgagcacagccattttgccccatccccgctgcagaaggactcaaccactcccctaagactccagcttcatagactcctctgtatcactgccttgaggcgcactttttataatcaagcctcatcttgctggtatcatgggaactccagcctgctatctttcatgaaggtcagcaccatccctggcctcctcacataggaatctagcagaaatgatagacacagtccacctttcggccggccagcctgatctgggctcagcatgtttggggtcagtcagtgttggagagcccacatatgggattgccactagcttcttctgccaatatcaaaataccttctcagatgctttagaaacatgcaacaccaactccttttctaccctcctctccgtccatacctacaaggccaaggacaaacgccatcttcatccttcttagaaagagatctattaccccattaggggagacagagagagtgaatggaggagtaccgagctggctatggacttgggtgtctggcaaacacagcttcagtctcactacttctgacactctggttattgggcactaagggccagactggaaagtcacttgagacacattctcagtttgttgcagtgccaggaatgctgcgctgctgctgctgcgcacctggcccatgctgtccctggcttccatgccgtccaggccctgccagaaaaggaaattggcatgcaattctaaactgcagtgactgggatgggaggggaggggagcagtgttgatgccaaaatacccacggggtctaccagccatggggtttgcttgcttaggagtagttgtttcagaggtgattacaggcctgggtttgactgtgcttaccaatgagtggtttttgagctatgagaaagtggatgggagtgggaggaggagagatgggtgaagacaaaagagttctttatgagcctcgatgttccctggtaaacttttaaaaaggccttctctcatgatctaagtcttggactggtggcatcatgtaactgctaaccttacagtaaaaacccaagaatgggtcaaaaatgtcttcccagtttctccaagctgcttctggaatgcaggtctgtcggctgggtgctctccagcagctgctcctgcctgattcaactgtagcctgtaatgggtaaaagccacatttaggaggtggtctgatcatagaacaccttaggaagaaagtccatgagactttctgactaggaaaccatgtggtttgaacttgaagaaaaatgtagacccatctgggttaattttcctacaatctgactcaactgccaggtgaaaaaaaaaaggaaaaatttttaagctaatatttcactcttttgtcattctccttaagtttcatctcctaaaaagcttacccagcctgagcttggggacctgtgcagaggaaactaagaaaaatgcactcatcaactccttctcccagtgaacgcccggtgagaaaatccatttgccacaggcccttaccttcaacaatcccccttctatagtgttcgctggtaaagggtgaggctcccaagtgctggaaagcccctggacttggctcatttctcagcaagggcaggatagcacgggtcctttccatagaaatatcaacaaattctaacccaagcaatccctggacctacctgcctccagggatctctgaagaaaaaaagtaacccattgatcaaatcagaggagaggaagcaggaggtctcctagagcccattgaggaagaggaactttctcagtaggacactttataagcctgagaaagctttgaaaaggcggaatgagttgattcatttccacctcaaaaggaacctttccaggtccccctggaaattgtgccctggagatgtttaacaaggagaactggtgaggaaagagtccttttttactgtagggaaaagccccaaactggcctcctgggggatgagggctgaaatgatcccgaaggccttttaattagtgtgaaatcctgctgtactcagaaatccttccccgaatttacagcacaggcaggatgacctaagaggcagtttacttccctgagacccacagttgggctgttctggaaacacatctgtgaatcatagccaattgccacagagaaaacagaaccaagcctccggtgaggccactccaccccagagaagtctgcagaattccaaggactcggattggatgttcagaattcagcaactggaaagtccttaaaaacaaacaggccaaaccaaatcaatattgctgtttctagatgtcccttctgtggttgagctagttttacagagataaatatattaagacaaggaggtgggggtgttatatgatcaatgatagccatttgaaagagagggaggagtacagaaggaaggcacttctgggtacttaattcagaaatttctttatatttcagcactggattatcatataatgcaagtgactatggactaagagttagttatggtgtcttatgactagatttattatggtatattaaagtaacaataatattaatattaccttcctttttttttttgtttcaaaagagatctttctccagatgcttcagcctgtctggccttcttatcatatgtgcagcacatcatgtctcagcaacagtgtggtgaggtccttaggtgtcccaagaacaactcagggagcacgggagggtctgcagttgggaccccacaactatacagctatagggtaggaggcttccttttcattggtcctgaatgaatacaaatcgctcagaaagcattttggtggcacagaaaggggatgtatttgtgttgagatcttattttattttgtatttatttatcttctttgacttgcacagcactattgggggtgggggaagcagggtagtgggagacgaaggcagaagcaagagtcaaactcagaatgactgagttgaattcactgtctagtcagcaatgcctgcttctgagtttggcccagagagaaggtattgagtaagattttaataactgtaaaaagtaagctggataagtaaaatcatgatggatccaaagcacagtttcttcatctcctgataaagaaagtcaaatgcttgataaattcagagtcacagatgtgagcatagctatattcttttaaacgagaggtagagtgacctagcactaagcaaatgagctgaaatgtcggaaacagagtccatcagcttatttggccacacgatcccaaactagttttatcttgggaaatggccctgtcctcagcattcccttcttgtgctggtggggccagtgaagtcttgatcttatcagaaaaaggccacaccaagtgcgagttttcccaggctgactttccaggcccttatcaaatgaaacaacagaagctcttcacagttctgtgccccatggccactccacagacagacaataccaagcatcttagaactgtcataagataggtcatgcctgaaatagatcttgaccatatgagagtcccagaaatcagcaaggcctggacaaatagaactaagagagaggcagaggcaggaagctgcgggtctatcttgtaaagagtttagcatcactgtgagagtgtgtgtctaaaattaaattaaactagaagcagcaggtgagtatttggtaagtacttctgtgactcgcctcaattcccactggccaggggccatctcaactgcacggtgaatcaagatgctggtgtcatcctccttggaaaaaggaaatgttaactcatggttaaaactaagtacaatgattcccaagggatcactttcttatttttttaaatgacattaaggagaatcttaagaaagcatcagagaaagacatgtgcatgtgaagcaccctgattctgatgttaggaaaacttaagcgaacaggacctgctgcacacagccccattgtcttctatccatttctctttatcattcaaatcaagcaacatgtgccctcctcatcaacacacattcttcccctttgtcagtatgcatctcccagcttagtgtcaggatactttcgattcataattatgtatgatccaaagtgtgcataatttcatttaacgttaaagaaatagatccaattcctttcttgcaaccaaaaataaataaaatacgttgcctcaatataaggtttgggctattctgtgtttctatagaagcaatctgtttttggtaaaatgtacttttaaggatccagtcatctgaagtattttatgtagagttagagatttcacaatattgactatacatatatttaaaatataaattatccagctgatgtttgaatttgtcttactttcctggccacctcgttgtcctattttataagctggggagttaactagcttaacaaaagatgcttagcttttgtaaaagaacaagtgtttcattttacaaagacactccaaatgatagttacttgattttctcgagacctttaactatggtgatgaataacaggacttgctttcaagccttaataaatgtaaaatgccttttaatgaagatacagctgagtgttttcctcatgaatctgaaccaattaccaatttgtgttccagtcttgattggtattgactgattcaaataaagttggtttattttcaaatattacaaaaaaaaaaaaaaaa

SEQ ID NO: 418 - DNA, 955 bp, Artificial Sequence
  BCL2A1
agcctacgcacgaaagtgactaggaggaaggatattataaagtgatgcaaacagaaattccaccagcctccatgtatcatcatgtgtcataactcagtcaagctcagtgagcattctcagcacattgcctcaacagcttcaaggtgagccagctcaagactttgctctccaccaggcagaagatgacagactgtgaatttggatatatttacaggctggctcaggactatctgcagtgcgtcctacagataccacaacctggatcaggtccaagcaaaacgtccagagtgctacaaaatgttgcgttctcagtccaaaaagaagtggaaaagaatctgaagtcatgcttggacaatgttaatgttgtgtccgtagacactgccagaacactattcaaccaagtgatggaaaaggagtttgaagacggcatcattaactggggaagaattgtaaccatatttgcatttgaaggtattctcatcaagaaacttctacgacagcaaattgccccggatgtggatacctataaggagatttcatattttgttgcggagttcataatgaataacacaggagaatggataaggcaaaacggaggctgggggaaatggcacaatcacacacctatgctggtagagtcagtggcccacaagaagaggaaaatggctttgtaaagaagtttgaacctaaatctggctggatgacttttctagaagttacaggaaagatctgtgaaatgctatctctcctgaagcaatactgttgaccagaaaggacactccatattgtgaaaccggcctaatttttctgactgatatggaaacgattgccaacacatacttctacttttaaataaacaactttgatgatgtaacttgaccttccagagttatggaaattttgtccccatgtaatgaataaattgtatgtatttttctctataaaaaaaaaaaaa

SEQ ID NO: 419 - DNA, 1696 bp, Artificial Sequence
  SERPINI1
agctgccaaattcgccaactagaggagggagaggcggagcttgggtccctgtagaagccagaggcgcagtctggactgtagtttcccgggagagacgaaagcaggaacgagagcggagcggagcacagtccgccgagcacaagctccagcatcccgtcaggggttgcaggtgtgtgggaggcttgaaactgttacaatatggctttccttggactcttctctttgctggttctgcaaagtatggctacaggggccactttccctgaggaagccattgctgacttgtcagtgaatatgtataatcgtcttagagccactggtgaagatgaaaatattctcttctctccattgagtattgctcttgcaatgggaatgatggaacttggggcccaaggatctacccagaaagaaatccgccactcaatgggatatgacagcctaaaaaatggtgaagaattttctttcttgaaggagttttcaaacatggtaactgctaaagagagccaatatgtgatgaaaattgccaattccttgtttgtgcaaaatggatttcatgtcaatgaggagtttttgcaaatgatgaaaaaatattttaatgcagcagtaaatcatgtggacttcagtcaaaatgtagccgtggccaactacatcaataagtgggtggagaataacacaaacaatctggtgaaagatttggtatccccaagggattttgatgctgccacttatctggccctcattaatgctgtctatttcaaggggaactggaagtcgcagtttaggcctgaaaatactagaaccttttctttcactaaagatgatgaaagtgaagtccaaattccaatgatgtatcagcaaggagaattttattatggggaatttagtgatggctccaatgaagctggtggtatctaccaagtcctagaaataccatatgaaggagatgaaataagcatgatgctggtgctgtccagacaggaagttcctcttgctactctggagccattagtcaaagcacagctggttgaagaatgggcaaactctgtgaagaagcaaaaagtagaagtatacctgcccaggttcacagtggaacaggaaattgatttaaaagatgttttgaaggctcttggaataactgaaattttcatcaaagatgcaaatttgacaggcctctctgataataaggagatttttctttccaaagcaattcacaagtccttcctagaggttaatgaagaaggctcagaagctgctgctgtctcaggaatgattgcaattagtaggatggctgtgctgtatcctcaagttattgtcgaccatccatttttctttcttatcagaaacaggagaactggtacaattctattcatgggacgagtcatgcatcctgaaacaatgaacacaagtggacatgatttcgaagaactttaagttactttatttgaataacaaggaaaacagtaactaagcacattatgtttgcaactggtatatatttaggatttgtgttttacagtatatcttaagataatatttaaaatagttccagataaaaacaatatatgtaaattataagtaacttgtcaaggaatgttatcagtattaagctaatggtcctgttatgtcattgtgtttgtgtgctgttgtttaaaataaaagtacctattgaacatgtgaaaaaaaaaaaaaaaaaaaa

SEQ ID NO: 420 - DNA, 1238 bp, Artificial Sequence
  NRGN
gagcgcgggagaccggacccgagagcagagctgctgtttcggcgcgggtcggctggcggccgactgccccagagcccccacccggcaccacacagaccccacccccgccctgcgccagccttcgtccccgcagaggaccccccgacaccagcatggactgctgcaccgagaacgcctgctccaagccggacgacgacattctagacatcccgctggacgatcccggcgccaacgcggccgccgccaaaatccaggcgagttttcggggccacatggcgcggaagaagataaagagcggagagcgcggccggaagggcccgggccctggggggcctggcggagctggggtggcccggggaggcgcgggcggcggccccagcggagactaggccagaagaactgagcattttcaaagttcccgaggagagatggatgccgcgtccccttcgcagcgacgagacttccctgccgtgtttgtgaccccctcctgcccagcaacctgccagctacaggagccccctgcgtcccagagactccctcacccaggcaggctccgtcgcggagtcgctgagtccgtgcccttttagttagttctgcagtctagtatggtccccatttgcccttccactccaccccaccctaaaccatgcgctcccaatcttccttcttttgcttctcgcccacctcttcccgcacccagcatgcagctctgcctccgcagcctcagtgcgctttcctgcgcgcactgcggagggcgccctaagcgtcacccaagcacactcacttaaagaaaaaacgagttctttcgttctgtgcgcagctaaaaggggcgccctacatctccgtgccactcccgccccagcctagccccaagactttggatccggggcgagatgaagggaagagggttgttttggtttcggacgacccttgctctgaccggaagagaagtccctatcccacacctgcctgtcacgttccctcccctttccccagcgcactgttgagggcagcctctccagctctcttgtttatgcaaacgccgagcgcctgggaggctcggtaggaggagtcttccacggccccgccccgcccctgtcggtcccgccctcccccccgccgggctcctggggctgtggccgaaaggtttctgatctccgtgtgtgcatgtgactgtgctgggttggaatgtgaacaataaagaggaatgtccaagtgaaaaaaaaaaaaaaaaaaaa

SEQ ID NO: 421 - DNA, 5777 bp, Artificial Sequence
  DIAPH1
attcatgaggcgcgcgcagcccggcatgctaatgaggcggggcgcggcggctggctaaagagcgactgggcggcggcgggcgcggagctgccaggcgggagcggcgtaggcgcggggtcgccggccagcgtgaaccgggacatggagccgcccggcgggagcctggggcccggccgcgggacccgggacaagaagaagggccggagcccagatgagctgccctcggcgggcggcgacggcggcaaatctaagaaatttctggagagatttaccagcatgagaattaagaaggagaaggaaaagcccaattctgctcatagaaattcttctgcatcatatggggatgatcccacagcacagtcattgcaagatgtttcagatgaacaagtgctggttctctttgaacagatgctgctggatatgaacctgaatgaggagaaacagcaacctttgagggagaaggacatcatcatcaagagggagatggtgtcccaatacttgtacacctccaaggctggcatgagccagaaggagagctctaagtctgccatgatgtatattcaggagttgaggtcaggcttgcgggatatgcctctgctcagctgcctggagtcccttcgtgtgtctctcaacaacaaccctgtcagttgggtgcaaacatttggtgctgaaggcttggcctccttattggacattcttaaacgacttcatgatgagaaagaagagactgctgggagttacgatagccggaacaagcatgagatcattcgctgcttgaaagcttttatgaacaacaagtttggaatcaagaccatgttggagacagaagaaggaatcctactgctggtcagagccatggatcctgctgttcccaacatgatgattgatgcagctaagctgctttctgctctttgtattctaccgcagccagaggacatgaatgaaagggttttggaggcaatgacagaaagagctgagatggatgaagtggaacgtttccagccgctgctggatggattaaaaagtggaaccactattgcactgaaggttggatgcctacagctgatcaatgctctcatcacaccagcggaggaacttgacttccgagttcacatcagaagtgaactgatgcgtttggggctacatcaggtgttgcaggaccttcgagagattgaaaatgaagatatgagagtgcaactaaatgtgtttgatgaacaaggggaagaggattcctatgacctgaagggacggctggatgacattcgcatggagatggatgactttaatgaagtctttcagattctcttaaacacagtgaaggattcaaaggcagagccacacttcctttccatcctgcagcacttactcttggtccgaaatgactatgaggccagacctcagtactataagttgattgaagaatgtatttcccagatagttctgcacaagaacggggctgatcctgacttcaagtgccggcacctccagattgagattgagggattaattgatcaaatgattgataagacaaaggtggagaaatctgaagccaaagctgcagagctggaaaagaagttggactcagagttaacagcccgacatgagctacaggtggaaatgaaaaagatggaaagtgactttgagcagaagcttcaagatcttcagggagaaaaagatgcactgcattctgaaaagcagcaaattgccacagagaaacaggacctggaagcagaggtgtcccagctcacaggagaggttgccaagctgacaaaggaactggaagatgccaagaaagaaatggcttccctctctgcggcagctattactgtacctccttctgttcctagtcgtgctcctgttccccctgcccctcctttacctggtgactctggcactattattccaccaccacctgctcctggggatagtaccactcctcctcctcctcctcctcctcctcctcctccacctcctttgcctgggggtgtttgcatctcctcacccccttctttacctggaggtactgctatctctccaccccctcctttgtctggggatgctaccatccctccaccccctcctttgcctgagggtgttggcatcccttcaccctcttctttgcctggaggtactgccatccccccacctcctcctttgcctgggagtgctagaatccccccaccaccacctcctttgcctgggagtgctggaattccccccccacctcctcccttgcctggagaagcaggaatgccacctcctcctccccctcttcctggtggtcctggaatccctccacctcctccatttcccggaggccctggcattcctccacctccacccggaatgggtatgcctccacctcccccatttggatttggagttcctgcagccccagttctgccatttggattaacccccaaaaagctttataagccagaggtgcagctccggaggccaaactggtccaagcttgtggctgaggacctctcccaggactgcttctggacaaaggtgaaggaggaccgctttgagaacaatgaacttttcgccaaacttacccttaccttctctgcccagaccaagacttccaaagccaagaaggatcaagaaggtggagaagaaaagaaatctgtgcaaaagaaaaaagtaaaagagttaaaggtgttggattcaaagacagcccagaatctctcaatctttttgggttccttccgcatgccctatcaagagattaagaatgtcatcctggaggtgaatgaggctgttctgactgagtctatgatccagaacctcattaagcaaatgccagagccagagcagttaaaaatgctttctgaactgaaggatgaatatgatgacctggctgagtcagagcagtttggcgtggtgatgggcactgtgccccgactgcggcctcgcctcaatgccattctcttcaagctacaattcagcgagcaagtggagaatatcaagccagagattgtgtctgtcactgctgcatgtgaggagttacgtaagagtgagagcttttccaatctcctagagattaccttgcttgttggaaattacatgaatgctggctccagaaatgctggtgcttttggcttcaatatcagcttcctctgtaagcttcgagacaccaagtccacagatcagaagatgacgttgttacacttcttggctgagttgtgtgagaatgactatcccgatgtcctcaagtttccagacgagcttgcccatgtggagaaagccagccgagtttctgctgaaaacttgcaaaagaacctagatcagatgaagaaacaaatttctgatgtggaacgtgatgttcagaatttcccagctgccacagatgaaaaagacaagtttgttgaaaaaatgaccagctttgtgaaggatgcacaggaacagtataacaagctgcggatgatgcattctaacatggagaccctctataaggagctgggcgagtacttcctctttgaccccaagaagttgtctgttgaagaatttttcatggatcttcacaattttcggaatatgtttttgcaagcagtcaaggagaaccagaagcggcgggagacagaagaaaagatgaggcgagcaaaactagccaaggagaaggcagagaaggagcggctagagaagcagcagaagagagagcaactcatagacatgaatgcagagggcgatgagacaggtgtgatggacagtcttctagaagccctgcagtcaggggcagcattccgacggaagagagggccccgtcaagccaacaggaaggccgggtgtgcagtcacatctctgctagcttcggagctgaccaaggatgatgccatggctgctgttcctgccaaggtgtccaagaacagtgagacattccccacaatccttgaggaagccaaggagttggttggccgtgcaagctaatgtgggtcctgtgaccgcggcagctcctcagcggagccgcagactgtcctgccctgcagcatgtgcctaaaggctcaaggggatattcctctggggtggccactcccaccaccctgaccctgtctttctctctggcctgctgctctctcaacatcacatacagcttcagctgcctggaggccagaaggaaagggcagtgcaggggaggcctgagcccgacttagccagccctggctgttgtattaccaaagcagggtccatgtttgctgccttaaccctgtctcctctctgttactcagagggcctcatctcagacaaggcccagcctgctttttctcagccctgactttctaatgggctttcccccctaggtcagtcttgctggatttgtgcttttcttttgtggtttctctggccctgagaatagcatggggcttgtaaacctttgggctagatccctcctttcattgctgttgtctctgctcttccctctcctggctgtggttatttattattagtggtgtggcactgggagctgctcctaaggaagcagggagcaaatcccacctttaccccaccttcctgggaaaggcctccaaagcaaaggatctggaccagtttccctgctgtgctgtggcccaggccagagcctgtgggcaggcaggcagggcatagcgacagtgtgggacctgcccccagcttctgccacgctttatgcccttgcctctctggacgctctgcaccaaccccaggctactgagccaccttccctcctcatgccttccctgagctttggtgcatctcatctggactatgggttgtactgtgaccatcccaacacctcaccctctgtctacaaggaaatgggaggtggagcctcctggctgagaaattgttttgcaaatggatctatttttgtatgaaaaaaaaaatttttttaaagaaaactgttccttccccctttcccctccataatgtaagaagctttggtggcaggttacagagttctgggatttcttctcacaggcccaatcctgaatgtgcccctggaccttctggacccttgagtccaaggcagatcctctctcccagggaatccgacacaggaggaaccccttctctggttgagctgggccaggcctaagagtagcaggaactctaagaccacagagttttttataaatgtataaatgtatcaagccaaatgtgcagatgctaactggacattctggggaactgggcaccaggagtgccttcatacactgtaccccagctctcttctaaaagagaagtgggtgggcacactgaactgtttggtggccccaaccacaggaagctgcaattctctggcttagggtgatacttttgccctccttgtgcccctctcagctttccatccccagctaggaagaaagaatggcactcttgggcttggcccagaattagagttattagagcaagagagagcttaggaagcatgagggcaactatagtgaggccttattgccaggagggagggttttggttgctggcgcttgtgtataaaggggcaagagcagctcctttggactattcctgggaggactctgatgcagggcgtctgttgctcccctgggtcacctcctccctgctcgctgacatctggggctttgaccctttcttttttaatctacttttgctaagatgcatttaataaaaaaaaagagagagagagagaggtgtgagggacaaaatgcaaacctatttcccttgcctcataggcttctgggatgtcatcacctccagtttgttggttttgtttccaactgttaataaagcattgaaacagtaaaaaaaaaaaaaaa

SEQ ID NO: 422 - DNA, 5253 bp, Artificial Sequence
  SALL1
ctttggaggttcagagctgcaagaagatggggactggtgtcggggcgccagcgcctgacccgctggggttgcggccggggtggagagtgctgctggccgccagttgttccggagacggtgcaaacggacggggaaagtgtcggggtctggctcgcaaaatttatctccgcatctcttcccacaacacttgcaccctctgccccccaaaatctttctggagacacagaaaagggtcaaccgagtcgccctactaagagcaaggatgcccacgtctgtggccggtgctgtgccgagttctttgaattatcagatcttctgctccacaagaagaactgtactaaaaatcaattagttttaatcgtaaatgaaaatccagcctccccacccgaaaccttctcccccagcccccctcctgataatcctgatgaacaaatgaatgacacagttaacaaaacagatcaagtggactgcagcgacctttcagaacacaacggacttgacagggaagagtccatggaggtggaggccccggttgctaacaaaagcggcagcggcacttccagcggcagccacagcagtaccgccccaagcagcagcagcagcagcagcagcagcagcggcggcggcggcagctcctccacaggtacctcagcgatcacaacctctctacctcaactcggggacctgacaacactgggcaacttctccgtaatcaacagcaacgtcatcatcgagaacctccagagcaccaaggtggcggtggcccagttctcccaggaagcgaggtgcggcggggcctctgggggcaagctggccgtcccagccctcatggaacaactcctagctctgcagcagcagcagatccaccagctgcaattgatcgaacagattcgtcaccaaatattgctgttggcttctcagaatgcagacttgccaacatcttctagtccttctcaaggtactttacgaacatctgccaaccccttgtccacgctaagttcccatttatctcagcagctggcagcagcagctggattggcacagagcctcgccagccaatctgccagcattagtggtgtgaaacagctacccccaatccagctacctcagagcagttctggcaacaccatcattccatccaacagcggctcttctcccaatatgaacatattggcagcggcagttaccaccccgtcctctgaaaaagtggcttcaagtgctggggcctcccatgtcagcaacccagcggtctcatcatcgtcctcaccagcttttgcaataagcagtttattaagtcctgcgtctaatccacttctacctcagcaagcctccgctaactcggttttccccagccctttgcccaacatcggaacaactgcagaggatttaaactccttgtctgccttggcccagcaaagaaaaagcaagccaccaaatgtcactgcctttgaagcgaaaagtacttccgatgaggcattcttcaaacacaagtgcaggttctgcgcgaaggtctttgggagtgacagtgccttgcagatccacttgcgttcccataccggagagaggccattcaagtgcaacatctgcgggaacaggttctccaccaaggggaatctgaaagtccactttcagcgccacaaagagaaataccctcatatccagatgaacccctatcctgtgcctgagcatttggacaatatccccacgagtactggcatcccatatggcatgtccatccctccagagaagccagtcaccagctggctagacaccaaaccagtcctgcctactctgaccacttcagtcggcctgccgttgcccccaaccctcccaagcctcatacccttcatcaagacggaagagccagcccccatccccatcagccattctgccaccagccccccaggctcagtcaaaagtgactccgggggccctgagtcagccacaagaaacctaggtgggctcccagaggaagccgaagggtccactctgccaccctctggtggcaaaagcgaagagagtggcatggtcaccaactcagtcccgacggcgagcagtagcgtcctgagctccccagcggcagactgcggccccgcgggcagtgccaccaccttcaccaaccctttgttgccgctcatgtccgagcagttcaaggccaagtttccttttgggggactcctggactcagctcaggcatcagagacgtccaagcttcagcaactggtagaaaacattgacaagaaggccactgaccccaatgagtgcatcatctgccaccgggttctcagctgccagagcgccttgaaaatgcactacaggacacacactggggagaggccctttaagtgtaagatctgtggccgggctttcaccacgaaagggaatcttaaaacccactacagtgtccatcgtgctatgcccccgctcagagtccagcattcctgccccatctgccagaagaagttcacgaacgctgtggtcctgcagcagcacatccgaatgcatatgggaggccagatccccaacaccccagtccccgacagctactctgagtccatggagtctgacacaggttcctttgatgagaaaaattttgatgacctagacaacttctctgatgaaaacatggaagactgtcctgagggcagcatccctgatacacctaagtctgcagacgcctcccaagacagcttatcctcttcgcctttgcccctcgagatgtcgagcatcgctgctttggaaaatcagatgaagatgatcaatgctggcctggcagagcagctacaggccagcctgaagtcagtggagaatgggtccatcgagggggatgtcctgaccaatgattcatcctcagtgggtggtgacatggaaagccaaagtgctggcagcccagccatctcagagtctacctcttccatgcaggctctgtccccgtccaacagcacgcaggagttccacaagtcacccagcattgaggagaaaccacagagagcggtcccaagcgagtttgccaatggtttgtctcccaccccagtgaatggtggggctttggatttgacatctagtcacgcagagaaaatcatcaaagaagattctttggggatcctcttcccttttagagaccggggtaaatttaaaaacactgcttgtgacatttgtggcaaaacatttgcttgtcagagtgccttggacattcactatagaagtcataccaaagagagaccatttatttgcacagtttgcaatcgtggcttttccacaaagggtaatttgaagcagcacatgttgacacatcagatgcgagatctgccatcccagctctttgagcccagttccaaccttggccccaatcagaactcagcggtgattcccgccaactcgttgtcatctctcatcaagacagaggtcaacggcttcgtgcatgtttctcctcaggacagtaaggacacccccaccagtcacgtcccgtctgggcctctgtcttcctctgccacatccccagttctgctccctgctctgcccaggagaactcccaagcagcactactgcaacacatgtggcaaaaccttctcctcatcgagtgccctgcagattcacgagagaactcacactggagagaaaccctttgcttgcactatttgtggaagagctttcacgactaaaggcaatcttaaggtacacatgggcactcacatgtggaatagcacccctgcacgacggggtcggcggctctctgtggatggccccatgacatttctaggaggcaatcccgtcaagttcccagaaatgttccagaaggatttggcggcaagatcaggaagtggggatccttccagcttctggaatcagtatgcagcagcgctctccaacgggctggcgatgaaggccaacgagatctccgtcattcagaacggtggcatccctccaattcctggaagcctcggcagtgggaacagctcacctgttagtgggctgacgggaaacctggagaggctccagaactcagagcccaatgctcccctggccggcctggagaaaatggcaagcagtgagaacggaaccaacttccgcttcacccgcttcgtggaggacagcaaggagatcgtcacgagttaaagcagctcgggctggagacatagcattcattcctgttcagaatgcgacctatggtggcctcctactccttgccccccaccccgccccgccccttccttctgttccccagatctatgaactacaacattatgaagacattcttttgtaccttgttcaactttagagttctaagaaagcttatttattagcgatataaccttgctttgcaaacagaatgcaagcgttaactttggtcttctgtattttggactaaatactaattgactagagtgctgtaaacttgctgtaacatttatggcaattgcaagttgccctgctaggcagttgtaatctggcattaacttattttctatatccagtttaatatgaatctggtgttgatgcaatgcctcagtgatgcattagatctctaataaagtctgtatatacatgtacactttgatcctgctggaaaattttatcagcaaacacattgtctaatctttcaaaacagatttaaggaaaggactgaaagtacagactgaacagtgtggttctttgaaaggtttggttttttaatttttattctaaaattcaacctttttttttgtcgatttaaccatttccattttgaactgctatttgtattgtgctttttacttgagtcgtcttcaatgttaataagtttctgtacagtaataagcacgcagaattctttagagaaaaagaaaacaagcgttgttttggtagttgaaactgagacgtaacattttgccttgtaggtatattcacgatagaaaatgtgtgctggaatttcacaatgctgctaagtatagcatcttgaacaaccttcagtggagaaaatgtagatgctcttgtatatacaataagaaatatcactttcattcaaatgtacatatgttccttacaagagcaaatgcttcttcttgatcaagagagcaggtatagtgtttgtttattttgtcttaggtatggaagaaaaaaattggactgttacatgcactttcttggaaagttgaaaggaaagggggggtccaatttctttaacatttaatacttactaacaacagagatactgtaattttactcaagtaatcaaatacattttttttgcaacagataaaacaaaatactgtg

SEQ ID NO: 423 - DNA, 2594 bp, Artificial Sequence
  SYNPR
agccttcccctggctccatgggtttccccctcccctgttgtatctaccctgccccagctcttccctgcccacccctcgctgactcgcttcgcttccccgacgcgctgggttcccggagcgcagagcccagcgttagcgggtgggctccccgaggccccctgccctcgccgggctgctccagggtgtcgctcctctggctgctcccgaaggggcttctggccctgaggacggtggtgccaagcgaacttcatttttaaaaagaactggtggatgagaagagcgagcgagggcgagctatggaccctgtgagtcagctggcctctgcgggcaccttccgggtgctgaaggagccccttgccttcctgcgagccctggaattgctttttgcaatctttgcatttgcaacatgcggtggctattctggaggcctgcggctgagtgtggactgcgtcaacaagacagaaagtaacctcagcatcgacatagcgtttgcctacccattcaggttgcaccaggtgacgtttgaggtgcccacctgcgagggaaaggaacggcagaagctggcattgattggtgactcctcgtcttcagcagagttcttcgtcactgttgctgtcttcgccttcctctactctttggctgccactgtcgtttacattttcttccagaacaaataccgggaaaacaaccggggcccactcattgacttcattgtcactgtagtcttttcgttcttgtggttggtgggttcatcagcttgggcaaaaggactgtctgacgtcaaagttgcaacggatcccaaggaagtattgctactaatgtcagcttgcaaacagccatccaacaaatgcatggctatccacagccctgttatgtcaagcttaaacacttctgtggtctttggattcttgaactttattctctgggctggaaacatatggtttgttttcaaggagaccggctggcattcttcgggacagagatatctttcagatccaatggagaagcactccagcagctataatcaaggtggttacaaccaagacagctatggatcaagcagtgggtacagtcagcaggcgagtttggggccaacctcagatgagtttggccaacagcctactggccccacttcctttaccaatcagatttaacagagtagcatttgcattcttctgcagtcgcctcaccatcttccatttcagtggcagaagaattttttaagggtttcaatcaattattaatgcagagagtattgaatgtaaatcagagctctctagtcttcattaaggcagcaagtcctgggttgtgaaaaatgatacttagagatgaggcgacatgaggagatatattattcatcatagatggctaattggagagtaccttgttatatatacagatactttcatggtcattttgtatgtatgttaaagtagtagaagtattttgtagcttaaagtctctagtatgtaatatgcataaagtaaatcaaatagcgttgagttttcttatgcattttgatgtgaaagatgttataataatttctagaagacaatttggtgtatcacaacatgcatgtcttatttttttttagttttaagtcctataggactatgagtctctaagttatttgtttcagaaaattattctttttttatgtgataaatcatatgatttaagtgcatgaataagcattttcccacacaatgaacatttgaactgtgtttatgaaaattttctggtttgcaccatgaatttgtcaaatggatatttataggaatatattcactactttgtatactttgcaaatttgtctctctggctttacccaagttctgaatgcattgtaattaaaatttaagtttttcttttcccccattagtaaacatttagtgctacatatgataactgcccaatatttattctatttacttagctaaatatttgcattcttgtaaccttctatggtgttttgtggctcttatcttgtggaccataaataacacggcccaataactctttgtgtttatggagtgttgttttcttagaataatggagatgcagatatagataccatagtcaaggtaccgccttgctgaagtatttatttataaagaatattctgtagaacctctactaccagctatatttttaaatcctgtttatttgtaaagctaatatgctcctcaatgtaattattaaaaattctcaagtcacagctaaacttactaattctgattttagtgtagcccctaaattaaaaatggcttccatatgccactctgtaccccaaagagagttctcatgaaatattctccagaatgtattcattatcaagaaaatgtcaatcgtcacttcctcgttttaactcagctgaaacaccaggacccaatagagagggcaagctgagcatctgtatttccagataaaagttgttattgatgtataaactcgttgcgtgattagtgatgttggaagcattttagcacaaaacagccttgtgtcttagatgatatctgtaaccagtttctgaatcccgttggataaaactgtattgtgatatctatttgatgttaataaagttattgcataca

SEQ ID NO: 424 - DNA, 2286 bp, Artificial Sequence
  PLEKHB1
aagagaggaaggcttaaagagccagactgcgcagccaggactggggtgatgggcgctgtcctgccaggccaaagaatgaagatgtagccccgcccccaacctagggaggaggaccagcccggttcctgtcctgcccccgcaacctcgccccgattccactccgggaacctcggcgatgctgagccaagaccacttctgaatcagggatgacttgtctagtgaacctagggtcagagccatcagttggaaaggctgggaggagcctggagaaagagggcgaccttccttgggatctgtgcgctccctccttgcctccccctccagcctcccacttggtagcaccttcctgatccccttatctctaaggcgctcagggaaatgccccgctgcgggagccttctgggaaatgctgccctggccacccaggaaccatgagccctgcagccccggtcccgcctgactccgctctggaaagtccttttgaagaaatggccctggtgaggggcggctggctgtggagacagagctccatcctccgccgctggaagcggaactggtttgccctgtggctggacgggaccctgggatactaccacgatgagacagcgcaggacgaggaggaccgtgtgctcatccacttcaatgtccgtgacataaagatcggcccagagtgccatgatgtgcagcccccagagggccggagccgagatggcctgctgactgtgaacctacgggaaggcggccgcctgcacctctgtgcggagaccaaggatgatgccctagcatggaagacagcactgctggaggcaaactccaccccggtgcgcgtctacagcccgtaccaagactactacgaggtggtgccccccaatgcacacgaggccacgtatgtccgcagctactacggaccgccctacgcaggccctggcgtgacgcacgtgatagtgcgggaggatccctgctacagcgccggcgcccctctggccatgggcatgcttgcgggagccgccactggggcggcgctgggctcgctcatgtggtcgccctgctggttctgagccctgggactcggagcactgacccctgcgcttggattgctagactcctcttcctcctggaccccatcctctaccatccaagccctgtcccactttggccctatcctctccattagctccttccgggtttggaccattccccccactccctacccttaatccccacatgggaagaagctatcatcacaggtacaaacatcgcttgaagtcttcacatctaccactagacacccccaaaatctgttatagacatttatggatacatttcctctaaacacaacagggcacagcaaatacgacttcatttggcttcgagttccccaggcgctgtagacacaacatgaatcgggctctctgctctctccttagggagctcgagtcctggtggggagaacaggagtaaacaaggacttgacaaagctgaagagttatcagtcctttgacaaggacaggtggggcagggagcaagacaggtaggctggaagaacagttattggcaagtatgcagagccgtgaacgtcatggcatgtccaaggaattaaatgggagttcatttgggctggggtggaggctgggatcagaccgtggtgggccttcaagctaaggagcttcctaggtgaaaggggagatgtgagccttctctggagggaagtttcatgattgcatctataatgaatatattgcctgttttgtgaatactgacacatgtccatacctaaaacactcctgagttaagtcccatccttcccacaaacagcttcctggctggtacccatgataacaattgagctgaacctggggacccctggttggggaacaggtgagttctatttgagacttccagccctagaaagctgcctccgtccagaaatgcctctcacaccaggagctcggccctctctttgtagctgtgactgtcaccctctcaggctttgtctcatccttcattctgaataagatggcagtgttctcctctggggcctgatccacctctacaccagcccaggaagccccatctgtgcctgccctcaggtggtccaccagtctccccctttggttcccttccagtctcttccccctttctatcccaatcaccaatagaaatgctaacatccctgcctggtagccagactagcccactaaagctcccctgtaaatgggggctccattagttctgctgccgagactaataaagatttggttggctctagcagtaaaaaaaaaaaaa

SEQ ID NO: 425 - DNA, 2143 bp, Artificial Sequence
  GAP43
actgaaggctagagaacaattccgagaaagagacggagagagagggaagaaaaagacagatagatagatattggggggaaggagaaaaaaggagaagagagggaagagaggacagcggagagagagcaccagagagagagggagagagagagagagcgctagagagagggagcgagcatgtgcgatgagcaatagctgtggaccttacagttgctgctaactgccctggtgtgtgtgagggagagagagggagggagggagagagagcgcgctagcgcgagagagcgagtgagcaagcgagcagaaaagaggtggagagggggggaataagaaagagagagaaggaaaggagagaaggcaggaagaaggcaagggacgagacaaccatgctgtgctgtatgagaagaaccaaacagaattaaaagggaacctggtctctgggttgttttcaacatctcaagtgtgaattttccctgtcaaaatcttcacaaggaaaatgagtcacagcatcacctgggtgacgaggtcataacacctcagcccttgcttaaaaaattttatttctacttttctattgtaaagagatctcaaaacaggaagataaaattggactgacagctctacagcctagtcttttagacagtgaactaggccagcattggcagacactggcgatgacaaagtcctgctctgaattatgccaccccgcactccactttttaccttgcctgggaggcttgaggaaaaatcttcagagagcagttcgacctagtccttattcacttggcttcttgactttctggatttcaagggttgaaaaaaatgatgacgaccaaaagattgaacaagatggtatcaaaccagaagataaagctcataaggccgcaaccaaaattcaggctagcttccgtggacacataacaaggaaaaagctcaaaggagagaagaaggatgatgtccaagctgctgaggctgaagctaataagaaggatgaagcccctgttgccgatggggtggagaagaagggagaaggcaccactactgccgaagcagccccagccactggctccaagcctgatgagcccggcaaagcaggagaaactccttccgaggagaagaagggggagggtgatgctgccacagagcaggcagccccccaggctcctgcatcctcagaggagaaggccggctcagctgagacagaaagtgccactaaagcttccactgataactcgccgtcctccaaggctgaagatgccccagccaaggaggagcctaaacaagccgatgtgcctgctgctgtcactgctgctgctgccaccacccctgccgcagaggatgctgctgccaaggcaacagcccagcctccaacggagactggggagagcagccaagctgaagagaacatagaagctgtagatgaaaccaaacctaaggaaagtgcccggcaggacgagggtaaagaagaggaacctgaggctgaccaagaacatgcctgaactctaagaaatggctttccacatccccaccctcccctctcctgagcctgtctctccctaccctcttctcagctccactctgaagtcccttcctgtcctgctcacgtctgtgagtctgtcctttcccacccactagccctctttctctctgtgtggcaaacatttaaaaaaaaaaaaaaaaagcaggaaagatcccaagtcaaacagtgtggcttaaacattttttgtttcttggtgttgttatggcaagtttttggtaatgatgattcaatcattttgggaaattcttgcactgtatccaagttatttgatctggtgcgtgtggccctgtgggagtccactttcctctctctctctctctctgttccaagtgtgtgtgcaatgttccgttcatctgaggagtccaaaatatcgagtgaattcaaaatcatttttgttttcctccttttcaatgtgatggaatgaacaaaaaggaaaaaattcaaaaaacccagtttgttttaaaaataaataaataaagcaaatgtgccaattagcgtaaacttgcggctctaaggctcctttttcaacccgaatattaataaatcatgagagtaatcaaggtcaaaaaaaaaaaaaaaaaaaaaaaaaaaaaaaaaaaaaaa

SEQ ID NO: 426 - DNA, 6792 bp, Artificial Sequence
  TRIM2
agcattttgagtgagcttgcagaaaatgaggggctttcagctggtcgcctgcttgtcacctctcgctgcctgaaaggcagctctcagagccctttcctgtccttctaattacagcggcgggggcagtgcgcgcttcgggacgcaattggaaaccagcgtgcagggtcaaagacagccggccccccatgtcagtggtctaggatggccagtgaaggcaccaacatcccaagtcctgtggtgcgccagattgacaagcagtttctgatttgcagtatatgcctggaacggtacaagaatcccaaggttctcccctgtctgcacactttctgcgagaggtgcctgcagaactacattcctgcccacagtttaaccctctcctgcccagtgtgccgccagacctccatcctgcccgagaaaggggtggccgcgctccagaacaatttcttcatcacaaacctgatggacgtgctgcagcgaactccaggcagcaacgctgaggagtcttccatcctggagacagtcactgctgtggctgcgggaaagcctctctcttgcccaaaccacgatgggaatgtgatggaattttactgccagtcctgtgagactgccatgtgtcgggagtgcacggagggggagcacgcagagcaccccacagttccactcaaggatgtggtggaacagcacaaggcctcgctccaggtccagctggatgctgtcaacaaaaggctcccagaaatagattctgctcttcagttcatctctgaaatcattcatcagttaaccaaccaaaaggccagcatcgtggatgacattcattccacctttgatgagctccagaagactttaaatgtgcgcaagagtgtgctgcttatggaattggaggtcaactatggcctcaaacacaaagtcctccagtcgcagctggatactctgctccaggggcaggagagcattaagagctgcagcaacttcacagcgcaggccctcaaccatggcacggagaccgaggtcctactggtgaagaagcagatgagcgagaagctgaacgagctggccgaccaggacttccccttgcacccgcgggagaacgaccagctggatttcatcgtggaaaccgaggggctgaagaagtccatccacaacctcgggacgatcttaaccaccaacgccgttgcctcagagacagtggccacgggcgaggggctgcggcagaccatcatcgggcagcccatgtccgtcaccatcaccaccaaggacaaagacggtgagctgtgcaaaaccggcaacgcctacctcaccgccgaactgagcacccccgacgggagcgtggcagacggggagatcctggacaacaagaacggcacctatgagtttttgtacactgtccagaaggaaggggactttaccctgtctctgagactctatgaccagcacatccgaggcagcccgtttaagctgaaagtgatccgatccgctgatgtgtctcccaccacagaaggcgtgaagaggcgcgttaagtccccggggagcggccacgtcaagcagaaagctgtgaaaagacccgcaagcatgtacagcactggaaaacgaaaagagaatcccatcgaagacgatttgatctttcgagtgggtaccaaaggaagaaataaaggagagtttacaaatcttcagggggtagctgcatctacaaatggaaagatattaattgcagacagtaacaaccaatgtgtgcagatattttccaatgatggccagttcaaaagtcgttttggcatacggggacgctctccggggcagctgcagcggcccacaggagtggctgtacatcccagtggggacataatcattgccgattatgataataaatgggtcagcattttctcctccgatgggaaatttaagacaaaaattggatcaggaaagctgatgggacccaaaggagtttctgtggaccgcaatgggcacattattgttgtggacaacaaggcgtgctgcgtgtttatcttccagccaaacgggaaaatagtcaccaggtttggtagccgaggaaatggggacaggcagtttgcaggtccccattttgcagctgtaaatagcaataatgagattattattacagatttccataatcattctgtcaaggtgtttaatcaggaaggagaattcatgttgaagtttggctcaaatggagaaggaaatgggcagtttaatgctccaacaggtgtagcagtggattcaaatggaaacatcattgtggccgactggggaaacagcaggatccaggtttttgatgggagtggatcatttttgtcctacattaacacatctgctgacccactctatggcccccaaggcctggccctaacttcagatggtcatgttgtggttgcagactctggaaatcactgtttcaaagtctatcgatacttacagtaatggtgggcaggtggatacccgcttccatggtcttgcactataaactggaatggatttctcaatgcgggaccagattatgactagagtttttatgccagaaggaatcattggtgaactttccaaggttatttctgaatgtaacaatttccttaaaaatgacttatccaatttctgtatttcacctttagggttaaaaaaaactcttctactgaatctataaaaactgcagttttacatctgtgaactatggcttaagggacaggatttatgtagctaaactaattttgcaaatcaaacagacacttaaaaaactagcatatgtaaaggtattcgttaatcctgtgaatggtagcttttgcacagaacttccaaaagcaaaacaaaaacaaaatctattgtagttatatacttcatttaacctaggtcacaagacccagggaatcttctaacctcacttttacagtaggtattactcttgtgacatttttttggttatcaacaactaaatataaattactttggaaaaagtaaggctgtcttgcaaaatgatcccagctctgattagcagccctctggagttcagaacttaagtatcagtgcaaatttctcaacctttctgggttagacaaagatccttttttgtgtgttcttttcaccacccctttggctcaccttgtatcagcaaacaaagtacttcttcagggaaacctgaaatttctaatgccttgaaaagcatattacaaaagtaatgctaccttttgggaaacaaactgccccgttaactccagatcattgcactggaatgtaatcaagaaagttagtcatgttttatgtaccatgttttcacacgtgtctcttctcttcgacttcctgaaagcgaaagctttacctcctgcaaatgtcagcacatgtagtaggacaccagtatcctaggacagagagccataagtagccctttggaggactgatggtgtcaaccaaaggcatgtgattgattaatgattcccccttagaaagcaagtgttaccaaagttgtgttatcttgaaagcattacaggtaagggcatgttatggttatttatcattgtttaatgaatagtagaggtgtcaagggactatgtatacatgattagggtaagatagaatgtattatatatatatatatatacacacacacatatatatagctgaatctttggtgtattgaaataggcagcactctgaaagacagaagcttcgtccagccactcttcagcacattcctttactaagcagtttaaagccgtcctagtggagcaagccctaaagcagatttaatttttgccattttccaagaatgacggtggtggcttttagtcagaaaatggccttctgtgctttcaaaaaaaaaaacaaaaaaaaaaccacacacacacataaaaaacccaacaggtcaaaataaaagttgaacttgagttacatttaatttaaatataaatgcattttgagaaatgttaagaacaatttagtcaatcgttcatctgtcattggtactgtaaaataagctgtggtctatttccactgtttaattttctactcagttctaccaaataggatgtcatgtttgacatttttgatagtgactttggggtcttcttcactgaaagcaccttagaactgtactataagaaaacatttcccctatgtataattatatgaatgtgatgtttattgcttattaatttataattcagtcattctctatataggacttcttaaaatttagaagggaaatctagctacttcaaattgtctgttaaatttattatgcccaaatcaacctctgaaaaaaggtttttccaggaagatttacatttaggtttaatatttttttagttaggtagagttttaaaaaatacttgagcctgtccgtgataaagctataaaattcaataactttttagaatgttaaatgaagacactgtttcctaacatcagtgagatacatctttgaatttaaacattcatatttactgagtacctactaggtaccaagtactcttttaggcactggaaatacagtgatggacaaaacaggtaaaaaatcgctgccccctcagagctgacattctggggtgggaatttcattttgccacgtactaacgttctgcacaaaagacaggctagactcttgtctagattgtttaaaagaaacttttcaaattggttacattaattttagtttattttcacaagtaaaaatggctttttatttagattctttctgtcccaggctgttgatcttaaaactagttgatttaaagagtttttttgcacaacatttcaattatatttgtgaacttagaaattaacttacaatctaaccagccatcatatcatatcctatcaggctagatatctcaatagtagactgaatacaaagctaattttttttacatgtcaatattggcacaaactggaatgaaagaatagtttgattcagacctgctccactatgtgttgctaaaacacatgctatgagcactccaggaaacactatattttttccaaaaaatatgtgattatatatgttaaagtatagataacatttcacacttggatacatatgtgcatttactgtatttcttggtaagcatatttttgggggaaagtgctgctgatatgatacaagtagacaaaatttaaatgaaattttgtcacattctatggaaaatggtttctggtaaactgagaaggatattaaaataagtggcttttttctgggctaccattattgtttgatttctctttgtcaagtgtatagaacctgtcatacattcatgataagtagcactgaaaaattactcattcaaatttcccctgggcacgtaaggcaaaatattgccggttgggatttcaaggtcagtgacgacgcatttcctcccagtacagaccccccagccccccttgctggacatggggaggcagagagtcacttgaccatccagaaatacatgactacaagtcctttatgactgtttgccattttttttaatggtacttagtattttgatcaaactttagtctccagaactaaacaagtccctaagtttccttattttaatttactgtgactagatttgaagcaaataaatactccagatccatgcagctagaacacacttgcttccactactaaatatacagggtatgtcctaacatggagttaactggaatagcagtacactagcaagtatctgtgaatccttagcactgacgggttaacagaaatgctttggtaatacctacttagttaattggaggaagtagtaaataaacattaggtaatctgcagattacttcaaatgggaaaaatctttttgtagactctatagtaccctctctattcactagcttctgaaaagggaggagtatttttagtttgacaatttaataatttaaaaacaagacatctccaggtaggaaaaaatgaaagctatttcatgcaaacattatctaatttagcttaaaagtgaaagtggtaatactgttggtttctgtaaatgttgcagggttttaaactttataattactttaatatttttgataactagaaatctagtattgccataaaggaaactaagtgcccatcaaagatttgtttggtataaataaagaattatttgttttgttttcaatgacagtaagctacaaatcatgatgcttaaaaactttctaaagatgaattgtgtggcagtgattggtctgtttgtggagaatgtatgaaagctattaatattctagaatagattaataaattggctatgttgttccaatgaatgtacagcacttccattaacttttgaaagcaacacagccttaaactcaatgcttttgctttatgacatgggaatgttctgtcatcaatggagtgtattcttgtaatagaattctttatatcgttctcaattctatagactttcaagcctatgtatgaatatgaaggggttttttttttttgctttgttttctttttagattttgtacattccatctttataggtctgtttcatatgttttatgtatagaacactaagtcttgcactctctgacattgatactgatatattctcgtcatttgttcttttatgaatcaaaatgttgactgcctatttaaagaaaagaatgaacgctgtgcatcaaagtgtttgtatgttcgtagctacatacgtaccacagtattttggatgctttagtctacaatgaaactttcaattaattctgtcttgaaacataggagaaacaggattcatgtgtatctctttaccatgcacaaaatctcaaatcattataataaagcttgttttctccatttgc

SEQ ID NO: 427 - DNA, 2530 bp, Artificial Sequence
  KLC1
ggggggagcaacactgagacgccattttcggcggcgggagcggcgcaggcggccgagcgggactggctgggtcggctgggctgctggtgcgaggagccgcggggctgtgctcggcggccaaggggacagcgcgtgggtggccgaggatgctgcggggcggtagctccggcgcccctagctggtgactgctgcgccgtgcctcacacagccgaggcgggctcggcgcacagtcgctgctccgcgcgcgcgcccggcggcgctccaggtgctgacagcgcgagagagcgcggccctcaggagcaaggcgaatgtatgacaacatgtccacaatggtgtacataaaggaagacaagttggagaagcttacacaggatgaaattatttctaagacaaagcaagtaattcaggggctggaagctttgaagaatgagcacaattccattttacaaagtttgctggagacactgaagtgtttgaagaaagatgatgaaagtaatttggtggaggagaaatcaaacatgatccggaagtcactggagatgttggagctcggcctgagtgaggcacaggttatgatggctttgtcaaatcacctgaatgctgtggagtccgagaagcagaaactgcgtgcgcaggttcgtcgtctgtgccaggagaatcagtggctacgggatgaactggccaacacgcagcagaaactgcagaagagtgagcagtctgtggctcaactggaggaggagaagaagcatctggagtttatgaatcagctaaaaaaatatgatgacgacatttccccatccgaggacaaagacactgattctaccaaagagcctctggatgaccttttccccaatgatgaagacgacccagggcaaggaatccagcagcagcacagcagtgcagccgcggctgcccagcagggcggctacgagatccccgcgcggctgcggacgctccacaacctggtgatccagtacgcctcgcaggggcgctacgaggtagctgtgcccctctgcaagcaggccctggaggacctggagaagacttcaggacacgaccacccggacgtggccaccatgctcaacatcctggccttggtgtacagggatcagaataaatacaaagatgcagctaacctactgaatgatgccttggctattcgtgagaaaactttgggcaaagatcatcctgcggtggcggcgactttgaataaccttgcagtcctttatggtaaaagagggaagtacaaagaagcagagccgttgtgtaaaagagctctggaaatccgagaaaaggttttggggaaggatcaccccgatgttgccaagcagttaaataacttggccttactgtgccagaaccagggcaagtatgaagaagtagaatattattatcaaagagccctcgagatctaccagacaaaactgggacctgatgaccccaacgtggctaagacgaaaaataacctggcatcctgctatttgaaacaaggaaagttcaagcaagcagaaacactgtacaaagagattctcactcgtgcacatgaaagggagtttggttctgtagatgatgaaaataaacccatctggatgcatgctgaagaaagagaagaatgcaaaggaaagcaaaaggatgggacatcttttggagagtatggcggctggtacaaagcctgcaaagttgatagtccaactgttacaaccactctaaaaaaccttggggcactttacagacgtcaaggcaaatttgaagctgcagaaacgttagaagaagctgctatgaggtctcgtaaacagggtcttgacaatgttcacaaacagagggtggcagaagtgctcaatgaccctgagaacatggagaagcgcaggagccgtgagagcctcaacgtggacgtggtcaagtacgagagtggccctgacggaggggaggaagtgagtatgagcgtagagtggaacggggatggcactggatctttaaaacgcagtggttcctttagcaaactccgggcttccattagacgcagcagtgagaagctggttaggaagctgaagggaggaagttcacgagagagtgagccaaagaaccccggggcgtctctggccgagcctctttttgtggaaaacgacagcagcagcagtggcctggaagacgccaccgctaactgaccccgacctggccccgctccaggatgggactgccgagtgtggcccggagctggcccgggacagccagggcggcagggagggcccctggccgggagccgcagcgctcactcatttctcctgcgtctgtgtgcataggacatgatactaataaccacacggctggcgtgaccttggggctggggctgggcctaagctggtgccctggtgcggcgtggtctctcccaggagacctggggcatgagctgggcccacggctcccttcccatgtgtaacttcctcacgttgtgtgcgataacgtattttattgtacatttttttaaattaaaagtttatatgccttatgctttaaaaaaaaaaaaaaaaaa

SEQ ID NO: 428 - DNA, 2178 bp, Artificial Sequence
  GJB6
ccgcagcccgcccgagccgcgtcagggcagaggcggggtggggcgcggttaaaaggcgcagcaggtgggagccggggccttcacccgaaacccgacgagagcccgacagccggcggcgcccgagcccgacctgcctgcccagccggagcgaagggcgccgccccgcgcagagcccgcgccagggccgccggccgcagagcagttaaaacgtgcaggcaccagaaggcacttcctgtcggtgaagaagacctgtctccggtgtcacgggcatcctgtgttttgcaaacggggctgacctcccttcctggggagcaggaagggtcagggaaggaaaagaagtacagaagatctggctaaacaatttctgtatggcgaaagaaaaattctaacttgtacgccctcttcatgcatctttaattcaatttgaatattccaggcgacatcctcactgaccgagcaaagattgacattcgtatcatcactgtgcaccattggcttctaggcactccagtggggtaggagaaggaggtctgaaaccctcgcagagggatcttgccctcattctttgggtctgaaacactggcagtcgttggaaacaggactcagggataaaccagcgcaatggattgggggacgctgcacactttcatcgggggtgtcaacaaacactccaccagcatcgggaaggtgtggatcacagtcatctttattttccgagtcatgatcctcgtggtggctgcccaggaagtgtggggtgacgagcaagaggacttcgtctgcaacacactgcaaccgggatgcaaaaatgtgtgctatgaccactttttcccggtgtcccacatccggctgtgggccctccagctgatcttcgtctccaccccagcgctgctggtggccatgcatgtggcctactacaggcacgaaaccactcgcaagttcaggcgaggagagaagaggaatgatttcaaagacatagaggacattaaaaagcagaaggttcggatagaggggtcgctgtggtggacgtacaccagcagcatctttttccgaatcatctttgaagcagcctttatgtatgtgttttacttcctttacaatgggtaccacctgccctgggtgttgaaatgtgggattgacccctgccccaaccttgttgactgctttatttctaggccaacagagaagaccgtgtttaccatttttatgatttctgcgtctgtgatttgcatgctgcttaacgtggcagagttgtgctacctgctgctgaaagtgtgttttaggagatcaaagagagcacagacgcaaaaaaatcaccccaatcatgccctaaaggagagtaagcagaatgaaatgaatgagctgatttcagatagtggtcaaaatgcaatcacaggtttcccaagctaaacatttcaaggtaaaatgtagctgcgtcataaggagacttctgtcttctccagaaggcaataccaacctgaaagttccttctgtagcctgaagagtttgtaaatgactttcataataaatagacacttgagttaactttttgtaggatacttgctccattcatacacaacgtaatcaaatatgtggtccatctctgaaaacaagagactgcttgacaaaggagcattgcagtcactttgacaggttccttttaagtggactctctgacaaagtgggtactttctgaaaatttatataactgttgttgataaggaacatttatccaggaattgatacgtttattaggaaaagatatttttataggcttggatgtttttagttctgactttgaatttatataaagtatttttataatgactggtcttccttacctggaaaaacatgcgatgttagttttagaattacaccacaagtatctaaatttggaacttacaaagggtctatcttgtaaatattgttttgcattgtctgttggcaaatttgtgaactgtcatgatacgcttaaggtggaaagtgttcattgcacaatatatttttactgctttctgaatgtagacggaacagtgtggaagcagaaggcttttttaactcatccgtttgccaatcattgcaaacaactgaaatgtggatgtgattgcctcaataaagctcgtccccattgcttaagccttcaaaaaaaaaaaaaaaaaaaaaaaaaaaaaaaaaaaaaaa

SEQ ID NO: 429 - DNA, 3581 bp, Artificial Sequence
  NDRG4
ctctttgttcgggcggcgggcacgggggaccacctcccacggtgtcaccgcacccaccccgcgcccttcctccgcctcctggagttcaccgggaccaggtggcggcgggtgcctttttgggggtgcgcggccatgcaattggtggatttttttaaaccgttttggaggggggagcgcggcgttgggggcgggagagcgctcctggctgtgagctgctcctgccgcttcgctccgcgctctcctgccgctccgctccgggtctcccgcgctcctctccccggctcggccgagcgcgctgccccgacgccgccacccagagccgggccgcgccgggcgccgagatgaaggtgctgggacaccggctggagctgctcacaggcctcctgctccacgacgtgaccatggccgggctgcaggagctgcgattccctgaggagaagccgctgctccggggccaggacgccaccgagctggagagctccgatgccttcctcttggctgcagacacagactggaaggaacatgacatcgagacaccctacggccttctgcatgtagtgatccggggctcccccaaggggaaccgcccagccatcctcacctaccatgatgtgggcctcaaccacaaactatgcttcaacaccttcttcaacttcgaggacatgcaggagatcaccaagcactttgtggtgtgtcacgtggatgcccctggacaacaggtgggggcgtcgcagtttcctcaggggtaccagttcccctccatggagcagctggctgccatgctccccagcgtggtgcagcatttcgggttcaagtatgtgattggcatcggagtgggcgccggagcctatgtgctggccaagtttgcactcatcttccccgacctggtggaggggctggtgctggtgaacatcgaccccaatggcaaaggctggatagactgggctgccaccaagctctccggcctaactagcactttacccgacacggtgctctcccacctcttcagccaggaggagctggtgaacaacacagagttggtgcagagctaccggcagcagattgggaacgtggtgaaccaggccaacctgcagctcttctggaacatgtacaacagccgcagagacctggacattaaccggcctggaacggtgcccaatgccaagacgctccgctgccccgtgatgctggtggttggggataatgcacccgctgaggacggggtggtggagtgcaactccaaactggacccgaccactacgaccttcctgaagatggcagactctggagggctgccccaggtcacacagccagggaagctgactgaagccttcaaatacttcctgcaaggcatgggctacatgccctcagccagcatgacccgcctggcacgctcccgcactgcatccctcaccagtgccagctcggtggatggcagccgcccacaggcctgcacccactcagagagcagcgaggggctgggccaggtcaaccacaccatggaggtgtcctgttgaagcccttgatcccgctgacgacgcccacgtcgaggccccaccgccatccttgcgccggctcatgttccctttagtttatttttgtgagggcaaaggggaggaaatggggttctgtttgaaaaaaatgaggggatcttagatgctgcagcagaacagtctccaggtgttttaaggggctcagtcctcctcatcccatctcactctccgtggtaacttagccaacttgacccctctcatcccactcccggcggcccaggcacagaagggcagggccatagggagggagattcgctacggatccaggccattcctgggtgagcccttgggcaggcatgtttggagatgagagaggcttcgagagggtgggtgctgggccacaggggtgcggggccagctcaggcactggcgtgggagccctgggagaccccttcccccaccctccaccaagcacacctgtttctgtctcatagcacatgtgacaatcatctggacaacagccacaagggggcgctcggaccaggcagccactttcctggtgctctctgggcccagctggtgctgtagggccacgcaggcaggggcgtcaaggggtttctctgcccaaggaagacagaacatggagaaccgtcagggcaggaaccccacagactgtcccttccagcccacactctgccacctcctggccctgtcccaattctgagccaaggcctccccgaggcagaagttgcctggtcctctgtccccacagtgacctgactgggggtgagggagaaggaggagagagcccatgtgtggtgtgtgtgcccctgagaacttcgtggtgactgcctttgggagcccgcaggtggccagaggcaggggtagctgagttcctggagaccccttttttgcccccaggttccccagagggcaacgccatcagtagcagtgtggtgtttcaggcagagctctggccaggctgtgccagtgtgtcccggacgcatcactaaggaagagagagtttatttagtcaactggcccaaggcagcgaggcttctacagtcccacaccccatagccgcctgggctggggcttactgggggctgaaggttctggacatgaacaagggtcaggtagaagagaaaggcttcccctacaccccagcctcctgctgtcccctgaagcccaggactgcgttgtatgctttccatccactcaccttaccccatagcatcttgcggcccagaaaccagagccatttgtctcagaccctaaatcaataatcacaaaccccaaaacgggagagagcagtgaaaacatgcagggctgtggacgggggaagggttgtggcgggtgttctgaggctgagaggacacctatatgcgtatttcctctacacacatcaccccccttctataatcttaagccatgactagcctggtggcgtgttagtttctgcccagttctaccccctcatgtgcttcttctgaatactgaatgtgactgtttgaaagctggtagaattcatccctcttactgtagataacactgcaaatcttggaattttgttttttgctgtttccagatgtatctataaatatctatacattatatgtgtgtgtgtgtgtgtgtgtgtgtgtgtacatcgggtcctcccatgtgtggtgttcttctggaggttgtctctttggtcaaggtgaacttttaatgtttattattttcttctccgcacaaagtaaagagcctaattttgtgtattctggtggctgctgtcatgagatgataaaatgtaaaacaaaactctagtcaacgtagaaagagttaactgtgctgaaaaactaataaagaacctaagaagaattccagtgtggtgatgccatgcccatcatgggaggcttttggagaaacagaatgtttgggcaggggctgctggtgctgcttgggttttgggttgagggtgctaggagaggatggtctccacccatctttctatttccagtacacgtcacattattttaccggtgagatgagaatgtcacaaacattaaaagccttatgtgctcaaaaaaaaaaaaaaaaaaaaaa

SEQ ID NO: 430 - DNA, 1467 bp, Artificial Sequence
  HMGB2
aaaccagttcacgccggagccccgtgagggaagcgtctccgttgggtccggccgctctgcgggactctgaggaaaagctcgcaccaggcaagaataccctccaataccctcgggtggacgcggatctgtcaacatgggtaaaggagaccccaacaagccgcggggcaaaatgtcctcgtacgccttcttcgtgcagacctgccgggaagagcacaagaagaaacacccggactcttccgtcaatttcgcggaattctccaagaagtgttcggagagatggaagaccatgtctgcaaaggagaagtcgaagtttgaagatatggcaaaaagtgacaaagctcgctatgacagggagatgaaaaattacgttcctcccaaaggtgataagaaggggaagaaaaaggaccccaatgctcctaaaaggccaccatctgccttcttcctgttttgctctgaacatcgcccaaagatcaaaagtgaacaccctggcctatccattggggatactgcaaagaaattgggtgaaatgtggtctgagcagtcagccaaagataaacaaccatatgaacagaaagcagctaagctaaaggagaaatatgaaaaggatattgctgcatatcgtgccaagggcaaaagtgaagcaggaaagaagggccctggcaggccaacaggctcaaagaagaagaacgaaccagaagatgaggaggaggaggaggaagaagaagatgaagatgaggaggaagaggatgaagatgaagaataaatggctatcctttaatgatgcgtgtggaatgtgtgtgtgtgctcaggcaattattttgctaagaatgtgaattcaagtgcagctcaatactagcttcagtataaaaactgtacagatttttgtatagctgataagattctctgtagagaaaatacttttaaaaaatgcaggttgtagctttttgatgggctactcatacagttagattttacagcttctgatgttgaatgttcctaaatatttaatggtttttttaatttcttgtgtatggtagcacagcaaacttgtaggaattagtatcaatagtaaattttgggttttttaggatgttgcatttcgtttttttaaaaaaaattttgtaataaaattatgtatattatttctattgtctttgtcttaatatgctaagttaattttcactttaaaaaagccatttgaagaccagagctatgttgatttttttcggtatttctgcctagtagttcttagacacagttgacctagtaaaatgtttgagaattaaaaccaaacatgctcatatttgcaaaatgttctttaaaagttacatgttgaactcagtgaactttataagaatttatgcagttttacagaacgttaagttttgtacttgacgtttctgtttattagctaaattgttcctcaggtgtgtgtatatatatatacatatatatatatatatatat

SEQ ID NO: 431 - DNA, 1003 bp, Artificial Sequence
  PLAC8
agttacctctcccctttcacgtagttttcatttgtggtgagattctctcccaggccacaagacatttcctgctcggaaccttgtttactaatttccactgcttttaaggccctgcactgaaaatgcaagctcaggcgccggtggtcgttgtgacccaacctggagtcggtcccggtccggccccccagaactccaactggcagacaggcatgtgtgactgtttcagcgactgcggagtctgtctctgtggcacattttgtttcccgtgccttgggtgtcaagttgcagctgatatgaatgaatgctgtctgtgtggaacaagcgtcgcaatgaggactctctacaggacccgatatggcatccctggatctatttgtgatgactatatggcaactctttgctgtcctcattgtactctttgccaaatcaagagagatatcaacagaaggagagccatgcgtactttctaaaaactgatggtgagtcaatgcaaacatgcctctcagaacatgtgggtttttagaaatatcactaaagactttgtcaattatttgttgttttgaataattcagcaataactatttcttaagtctcctgaagtgctatcataatatcaagattggctttaattttcttcttatgaagaagatagctctatactttgaaaccatattttagtaaataaaggaatggtgaattttctaaacttctcagaattctggtgatctattaaggaagcacttaccacttgtaaaataccagagtatggtgagatacaaaagaattagaaaacatgttccctgctaagacaaacaagttgacaaaaggaattcgtaaataattataaaatagaagagtaaagaaaataacattctgtatgatatttggattgattgtggcataaagcatctatcatagcaaggtgaggttaaatagaaaactcctgttggagaagctgaactttgaaagaggtgaacatagaatttagaatgtttggaaatgt

SEQ ID NO: 432 - DNA, 1943 bp, Artificial Sequence
  CDC2
gtagctgccgctgcggccgccgcggaataataagccgggtacagtggctggggtcagggtcgtgtctaggggacggccgagggcctcggagggcgagtattgaggaacggggtcctctaagaaggccggactggaggatctaccatacccattgactaactatggaagattataccaaaatagagaaaattggagaaggtacctatggagttgtgtataagggtagacacaaaactacaggtcaagtggtagccatgaaaaaaatcagactagaaagtgaagaggaaggggttcctagtactgcaattcgggaaatttctctattaaaggaacttcgtcatccaaatatagtcagtcttcaggatgtgcttatgcaggattccaggttatatctcatctttgagtttctttccatggatctgaagaaatacttggattctatccctcctggtcagtacatggattcttcacttgttaagagttatttataccaaatcctacaggggattgtgttttgtcactctagaagagttcttcacagagacttaaaacctcaaaatctcttgattgatgacaaaggaacaattaaactggctgattttggccttgccagagcttttggaatacctatcagagtatatacacatgaggcaataacactctggtacagatctccagaagtattgctggggtcagctcgttactcaactccagttgacatttggagtataggcaccatatttgctgaactagcaactaagaaaccacttttccatggggattcagaaattgatcaactcttcaggattttcagagctttgggcactcccaataatgaagtgtggccagaagtggaatctttacaggactataagaatacatttcccaaatggaaaccaggaagcctagcatcccatgtcaaaaacttggatgaaaatggcttggatttgctctcgaaaatgttaatctatgatccagccaaacgaatttctggcaaaatggcactgaatcatccatattttaatgatttggacaatcagattaagaagatgtagctttctgacaaaaagtttccatatgttatatcaacagatagttgtgtttttattgttaactcttgtctatttttgtcttatatatatttctttgttatcaaacttcagctgtacttcgtcttctaatttcaaaaatataacttaaaaatgtaaatattctatatgaatttaaatataattctgtaaatgtgtgtaggtctcactgtaacaactatttgttactataataaaactataatattgatgtcaggaatcaggaaaaaatttgagttggcttaaatcatctcagtccttatggcagttttattttcctgtagttggaactactaaaatttaggaaaatgctaagttcaagtttcgtaatgctttgaagtatttttatgctctgaatgtttaaatgttctcatcagtttcttgccatgttgttaactatacaacctggctaaagatgaatatttttctactggtattttaatttttgacctaaatgtttaagcattcggaatgagaaaactatacagatttgagaaatgatgctaaatttataggagttttcagtaacttaaaaagctaacatgagagcatgccaaaatttgctaagtcttacaaagatcaagggctgtccgcaacagggaagaacagttttgaaaatttatgaactatcttatttttaggtaggttttgaaagctttttgtctaagtgaattcttatgccttggtcagagtaataactgaaggagttgcttatcttggctttcgagtctgagtttaaaactacacattttgacatagtgtttattagcagccatctaaaaaggctctaatgtatatttaactaaaattactagctttgggaattaaactgtttaacaaataaaaaaaaaaaaa

SEQ ID NO: 433 - DNA, 6046 bp, Artificial Sequence
  MAP4
aggccccacccgctggtggcccggtccgcgtgtgcgccgactctcgcactctcctcgctccgggcgcccagactctgagagagagcgacggccatcatagaacagcgaaggcagtcgatcggcctgcggtccgcttcggcattcgcaggccgcaggcgggaggctagagcccccaggcgcacctcgccccaaccgcccgcggctcgggcagctctgcagagacgtcgtggcggcagggccagcacccattggtccgccacagccctccgccctccccctcgccacgcttattggccggagcggcggcgctcgccgggtaggcggtggcggcgtccctcccttgcgccggccctcaagaggcgacgaggaagcggccgcctccctgcgccccgcccctccggctagctcgctggctcccggctcctcccgacgtctcctacctcctcacggctcttcccggcgctctcctggctcccttctgccccagctccgtctcggcggcggcgggcagttgcagtggtgcagaatggctgacctcagtcttgcagatgcattaacagaaccatctccagacattgagggagagataaagcgggacttcattgccacactagaggcagaggcctttgatgatgttgtgggagaaactgttggaaaaacagactatattcctctcctggatgttgatgagaaaaccgggaactcagagtcaaagaagaaaccgtgctcagaaactagccagattgaagatactccatcttctaaaccaacactcctagccaatggtggtcatggagtagaagggagcgatactacagggtctccaactgaattccttgaagagaaaatggcctaccaggaatacccaaatagccagaactggccagaagataccaacttttgtttccaacctgagcaagtggtcgatcctatccagactgatccctttaagatgtaccatgatgatgacctggcagatttggtctttccctccagtgcgacagctgatacttcaatatttgcaggacaaaatgatcccttgaaagacagttacggtatgtctccctgcaacacagctgttgtacctcaggggtggtctgtggaagccttaaactctccacactcagagtcctttgtttccccagaggctgttgcagaacctcctcagccaacggcagttcccttagagctagccaaggagatagaaatggcatcagaagagaggccaccagcacaagcattggaaataatgatgggactgaagactactgacatggcaccatctaaagaaacagagatggccctcgccaaggacatggcactagctacaaaaaccgaggtggcattggctaaagatatggaatcacccaccaaattagatgtgacactggccaaggacatgcagccatccatggaatcagatatggccctagtcaaggacatggaactacccacagaaaaagaagtggccctggttaaggatgtcagatggcccacagaaacagatgtatcttcagccaagaatgtggtactgcccacagaaacagaggtagccccagccaaggatgtgacactgttgaaagaaacagagagggcatctcctataaaaatggacttagccccttccaaggacatgggaccacccaaagaaaacaagaaagaaacagagagggcatctcctataaaaatggacttggctccttccaaggacatgggaccacccaaagaaaacaagatagtcccagccaaggatttggtattactctcagaaatagaggtggcacaggctaatgacattatatcatccacagaaatatcctctgctgagaaggtggctttgtcctcagaaacagaggtagccctggccagggacatgacactgcccccggaaaccaacgtgatcttgaccaaggataaagcactacctttagaagcagaggtggccccagtcaaggacatggctcaactcccagaaacagaaatagccccggccaaggatgtggctccgtccacagtaaaagaagtgggcttgttgaaggacatgtctccactatcagaaacagaaatggctctgggcaaggatgtgactccacctccagaaacagaagtagttctcatcaagaacgtatgtctgcctccagaaatggaggtggccctgactgaggatcaggtcccagccctcaaaacagaagcacccctggctaaggatggggttctgaccctggccaacaatgtgactccagccaaagatgttccaccactctcagaaacagaggcaacaccagttccaattaaagacatggaaattgcacaaacacaaaaaggaataagtgaggattcccatttagaatctctgcaggatgtggggcagtcagctgcacctactttcatgatttcaccagaaaccgtcacaggaacggggaaaaagtgcagcttgccggccgaggaggattctgtgttagaaaaactaggggaaaggaaaccatgcaacagtcaaccttctgagctttcttcagagacctcaggaatagccaggccagaagaaggaaggcctgtggtgagtgggacaggaaatgacatcaccaccccaccgaacaaggagctcccaccaagcccagagaagaaaacaaagcctttggccaccactcaacctgcaaagacttcaacatcgaaagccaaaacacagcccacttctctccctaagcagccagctcccaccaccattggtgggttgaataaaaaacccatgagccttgcttcaggcttagtgccagctgccccacccaaacgccctgccgtcgcctctgccaggccttccatcttaccttcaaaagacgtgaagccaaagcccattgcagatgcaaaggctcctgagaagcgggcctcaccatccaagccagcttctgccccagcctccagatctgggtccaagagcactcagactgttgcaaaaaccacaacagctgctgctgttgcctcaactggcccaagcagtaggagcccctccacgctcctgcccaagaagcccactgccattaagactgagggaaaacctgcagaagtcaagaagatgactgcaaagtctgtaccagctgacttgagtcgcccaaagagcacctccaccagttccatgaagaaaaccaccactctcagtgggacagcccccgctgcaggggtggttcccagccgagtcaaggccacacccatgccctcccggccctccacaactcctttcatagacaagaagcccacctcggccaaacccagctccaccaccccccggctcagccgcctggccaccaatacttctgctcctgatctgaagaatgtccgctccaaggttggctccacggaaaacatcaagcatcagcctggaggaggccgggccaaagtagagaaaaaaacagaggcagctgctacaacccgaaagcctgaatctaatgcagtcactaaaacagccggcccaattgcaagtgcacagaaacaacctgcggggaaagtccagatagtctccaaaaaagtgagctacagccatattcagtccaagtgtggttccaaggacaatattaagcatgtccctggaggtggtaatgttcagattcagaacaagaaagtggacatctctaaggtctcctccaagtgtgggtctaaggctaacatcaagcacaagcctggtggaggagatgtcaagattgaaagtcagaagttgaacttcaaggagaaggcccaggccaaggtgggatccctcgataatgtgggccacctacctgcaggaggtgctgtgaagattgagacctacaggctgacgttccgggcaaatgccagggcccgcaccgaccacggggccgacattgtctcccgccccccacacttccctggcggccccaactcgggctcccgggtccttggccccctttcccgggctgtccactagaccagtgagcgcttgggcgccgtgctgggcagcccgctaggctcgccttccctcctgctttgcgtgcccggggcagcagcagccctgccccacacctcctctcactccccagcctgggcccatctccctgctttggtcttgccccatcactgcgccactgctccgtggaggaggttgggagggggttggggtggttgaggctaagttgggatctaggagaggagaaccagattctatcctcatctttttttggttctttggtccaaacccaaaagaaactgacatgccctcccttctccctggatctacctggagggaagagtggaggtggattccgagtggtgacaggacgctgaccgtggagcttaagccactgcctctccctctggtcccacaaatgggcgcccccccctccccatgcaggtggtgtcgggcccttcttgctgccctgccccaagttgggggtcagtgctgcctgtccccatgcttaacatacccgcctagctgctgtcacatttttcttgttttgtccttttatttttttctaataacctaaaaactggcaaaatagttctgcaggttgaagccatgtctacatgaaagtcctcagtaagtgttagagggaacagggcggagatatccttatgccacccccgctggaggatgtgggcagcttagggccctggaggcggtgcggcagggaagaggggtgcagaggctgtggctggtgagccggtcaggcacacaaggggcccttggagcgtggactggttggttttgccattttgttgtgtgtatgctgcttttcttttctaaccaagaggctggttttggcatctctgtcccattccctgggatctggtggtcagccctaggataaaaagccagggctggagaacaagaaagggccaggagatggaattccttcaggccggcacccacaccctaggacatgtaagccctcatgtccaagggagcctcatgcagatagtaggaaatcaggtctggaaatttaaaaataaaaggcatgagactaaggctatctgcttcccttatgccctgactggagaggggagggaggagaggcaaggcccacagagggcatcccagctaggccttgggatggctgcagtgaggagaaatcccgggaactgtattgacacaaagattcttattgcacttgtattttttgtattaaagtttgcatggtttctaataaaggattcaaacataagtttgtagtgaaatggcctgggagattccaagggcttctctggagggggattggctgcagtgtagatttgcctctgaggaggctgccccagacttggcctcctcatgccccctcctgacctctgcccttctctggtcctggcatccctggagaaggtaggggtcttgacctaagtttagatttgatctccatgtgcagggaggctgtcctgggcctgacaggtcctccccctttctgaggtagcagtgccttgtggaggtttgacaccatgtccctagctccccaagcacacaccaggaaactgcaggggctcacggaggaagtgctgcctgggccagggggaccagctttcctccgtagagaccatgtgcagaacacttctgctgtgccaagaacatgagggagccagtgttttgtcagcaggaagaaagggcctgctgggatgaaagtgggaaggaaacagggttgcgtagtcaggagacacctcaggggcaacagcacaggcccagagtacctgctgcctccactgcgtctgtcctggggtcatgaggatgctgaggttgacgacaggttccaggtcctttcactcctttggccaaaggttgggggtaggtggcccaagtggcgtgctctctaggtagacaacaggagtggtcagagttccctcaaaggatcctccactccagagcacctgagaaggccgggaccagaggccctgtgtgatgtgtactccgcagctgtttggggtgggacatttctgtacttctcgatttgcttatggctcagccattacctgtgtcagtccatgattctgttgtaacagttttaagagtaaataaataaagctgcctgatgtcccatcacgcagaaaaaaaaaa

SEQ ID NO: 434 - DNA, 6066 bp, Artificial Sequence
  SLC12A5
ctccctcctagagcctggttgcagccacttgtgcgatcccggaccttgccgcggccgcctggctcctttccgcgccatgagccgcaggttcacggtcacctcgctgccccccgcagggcccgccagaagccctgacccagagtcccgccggcattcggtcgcagacccccgccacctcccgggggaagacgtcaaaggtgatggcaaccccaaggaaagcagtcccttcatcaacagcaccgacacagagaagggaaaggagtatgatggcaagaacatggccttgtttgaggaggagatggacaccagccctatggtgtcctccttgctcagtggcctggccaactacaccaacctgccccagggaagtagggagcatgaagaggcagaaaacaatgagggtggaaaaaagaagccggtgcaggccccacgcatgggcaccttcatgggcgtgtacctgccgtgcctgcagaacatctttggcgtcatcctcttcctgcggctcacctgggtggtgggcattgcaggcatcatggagtccttctgcatggtgttcatctgctgctcctgtacgatgctcacggccatctccatgagtgcaattgcaacgaatggtgttgtgcctgctggtggctcctactacatgatttccaggtctctgggcccagagtttgggggtgccgtgggcctctgcttctacctgggcactacctttgcaggagccatgtacatcctgggcaccatcgaaatcctgctggcttacctcttcccagccatggccatcttcaaggcagaagatgccagtggggaggcagcagccatgctgaacaacatgcgtgtttacggcacctgtgtgctcacctgcatggccactgtggtgtttgtgggtgtcaagtatgtcaacaagtttgcccttgtcttcctgggttgtgtcatcctctccatcctggccatctatgctggggtcatcaagtctgccttcgacccacccaacttcccgatctgcctcctgggtaaccgcacgctgtctcgccatggctttgatgtctgtgccaagctggcttgggaaggaaatgagacggtgaccacacggctatggggccttttctgctcctctcgcttcctcaacgccacctgtgatgaatacttcacccgaaacaatgtcacagagatccagggcatccctggtgctgccagtggcctcatcaaagagaacctctggagctcctacctgaccaagggcgtgattgtggagaggagtgggatgacctcggtgggcctggccgatggcactcctatcgacatggaccacccttatgtcttcagtgatatgacctcctacttcaccctgctggttggcatctacttcccctcagtcacagggatcatggctggttctaaccgctctggggacctgagggatgcccagaagtcaatccccactggcaccatcctggccatcgccaccacctctgctgtctacatcagctccgttgttctgtttggggcctgcattgagggggtcgtcctgcgggacaagtttggcgaagctgtgaatggcaacctcgtggtgggcactctggcctggccatctccatgggtaattgtcatcggatccttcttctccacctgtggggctgggctgcagagcctcacgggggccccacgcctgctgcaggccatctcgagggatggcattgtgcccttcctgcaggtctttggccatggcaaggccaatggagagccgacctgggccctgctcctgactgcctgcatctgcgagattggcatcctcattgcatccctcgacgaggtggcccccatcctctctatgttcttcctgatgtgctacatgtttgtgaatctggcctgtgcagtgcagacgctgctgaggacacccaactggaggccacgctttcgatattaccactggaccctctccttcctgggcatgagcctctgcctggccctcatgttcatctgctcctggtattatgcactggtagccatgctcattgctggactcatctacaagtacattgagtaccgtggggcagagaaggagtggggcgatgggatacgaggtctgtctctcagtgcggctcgctatgccctcttacgcctggaggaagggcccccacacaccaagaactggaggccacagctgctggtgctggtgcgtgtggaccaagaccagaatgtggtgcacccccagctgctctcactgacctcccagctgaaggcagggaagggcctgaccatcgtgggctctgtccttgagggcacctttctggaaaatcatccacaggcccagcgggcagaagagtctatcaggcgcctgatggaggcagagaaggtgaagggcttctgccaggtggtgatctcctccaacttgcgtgatggcgtgtcccatctgatccagtccgggggcctcggggggctgcagcacaacactgtgcttgttggctggccccgcaactggcgccagaaggaagatcatcagacgtggaggaacttcattgagctggtccgggaaaccacagctggccacttagccctgctggtcaccaagaacgtttccatgtttcctgggaaccctgagcgcttctctgagggcagcatcgacgtttggtggattgtgcacgatggaggcatgctcatgctgctgcccttcctgctgcggcaccacaaggtctggcggaagtgcaagatgcgtatcttcactgtggcccagatggatgacaatagcatccagatgaagaaggatctgaccacatttctgtatcatttacgcatcactgcggaggtcgaggtggtggagatgcatgagagcgacatctcagcttacacctatgagaagacgttggtgatggagcagcgttcccagatcctcaaacagatgcatttaaccaagaatgagcgggagcgggagatccagagtatcacagatgagtcacgaggctcaatccggagaaagaatccagccaacacgcggctccgcctgaacgtcccagaagagacggctggtgacagtgaagagaagccagaggaggaggtgcagctgatccacgatcagagtgctcccagctgccccagcagctccccgtccccaggggaggagcctgagggggaaggggagacagatccggagaaggtgcatctcacctggaccaaggacaagtcggtggcagagaagaataagggccccagtcctgtctcctctgagggcatcaaggacttcttcagcatgaagccggagtgggagaacttgaaccagtccaacgtgcggcgcatgcacacggccgtgcggctgaacgaggtcatcgtgaagaaatcccgggacgccaagcttgttttgctcaacatgcctgggcctccccgcaaccgcaatggtgatgaaaactacatggagtttctcgaggtcctcacagagcacctggaccgggtgatgctggtccgcggcggcggccgcgaggtcatcaccatctactcctgagaaccaggacctgccacccgggcccgagcgcgcccggcccgcggctccggagccctcgccgcgccccccgccgctgtcaccgtttacatacagaccctgtgcccgtgtcctggccccttaccccgctgcctgaagcccggaggccacgcctgttggggctgattcggagagggcgccccgccgcgcagagaccagagctcctcagtgccagtttggcccctgggtcttcgctgccctttttctaagcccggcctcgtctcgccggaggagacgctgcaataaaggttgggagaaggcgcggaaaggagaggagctggggccttggggacccccaggtagtccatgcggcccattcctccccttcccactcccgccgcggtcctcgctctgcgctcctccggcgctgctccctggctcccggcggcccggaggcccgcggggtgggaaggccgcgcttgccgtctccgccgccccttctcgccgagccgtggggcgcgggcggccgagcctatacatagtgtacaggagacatcgcgtgtatttttaacgtccccatatttatgtgactagaagcgcaacagacttctcgccatagtcgagctctcccgctgggggcactgcggggaggcgaggcctcgggaagctgaattttccttgacgtccaagagtttgagagcgaaagtgctttaggcccaggcgggggtcgtggcctcgttccctcgacacctccgtcctgctctcgcctcttcgccctttccgcgcgcccttggcttcccaccctcctctccagtccttttccgagatgaggtgagacaagggtccaacttttcctggattcgcctcccagcggacgtgagcttccactgcggctgcagagacgcgagcaacctcttctcatcggctcttatgcaagttggggccaggataggggaggggtgctcctcaagaggaagaaaccgagaggcccgcgccccaccgaggaagccccgccccggtgccttcgctggggagcaggcgtctctcctcagtcggcttgtcgcctgctccccgtatcccatggctcctcgccaaagactgaaattgtggagctggagggcgccccctccccggagtttcctccctgggacaagtgagggaggagggggccgattctggtttaggggccggacccactgagaggccccagagccgcccgtgatgttcctcccccgtccccatctggcagctcctgtctcgcctgagggacccagccgccttctccgtgctctggggccgggcctcgctgcttagcagcggcctctagctccgtctcccggggacctgggcctgagggagggctggagtcgcacgcgctttgtccttagcgcctgtctgctctcctctaactaggacccagggcctttggcttccccagctcatccttggcccttccgctccaccagcctggtctgaggcgtgctctgtccttagagaaggcgcggtggccgggttcccttcccctagggcacattactaagggggtcaggcactgcatgctcgttccagcaccatctgggactgggtacagtacctccagccccagggccctgacctgcgcacctagcttgacatctcacgcacctcccagagctggcgccactgagtaatccggacctcaccacctcttttcctttgagcccaaggcagagctggagctggcgccacccagacagcgtcaggtgtggctggggtaggtttggaggtctgccagttacaccaagtcccctctgagattcgatcaggggactggatagattctttcaggtactcaatcaggaagctggaggtgttagacaccagccccctgcatccttcagtagacctccctctgaacaccacagccaggtcctgccttctgggggcctgaatattccagagctgatgtgatgggctgtgcagaagggggctgtatcaacatcaattagggaaccaaagttgcactatctgggcccagattgtctggttggcaagagcaaagtttccgttgatgaaacagacatcccacaacaaaaacccaagttttctgtgctacatgtgcaatatttgttatgaatgttatcacaagtcattcatcaagttatctttataatcactgtagttagatgtttcatgtccattcaagtgacttttattctgagtgcaatatttcaatagccttgtagtgataactagtgttgcttttgttttagatgatctatgtgcagggcaatgcaatgaagttgaaaacccttgtaaataggagaggttgcaaaccaaatcaagagtatttattactattactgctattattattaggcctgcctttaattttcagtgtaagtgttcagtatgccgcatcctgcctcagtattgatcttgtgttctttgtgccaatatgaaaaggagagggttggttctttcctttattgttgaatgctcccatttaatgctttatggcttttactgtattacttttttagactcccgtctgcacaaaatgcaataaaaataattttattatacccttaaaaaaaaaaaaaaaaaaaaaaaaa

SEQ ID NO: 435 - DNA, 3554 bp, Artificial Sequence
  ZSCAN31
attgctgggcaactaggtcccgccggagcgttccagctcaaagattacctgctgcagtcaggcagaaatgtaaagtctttcctgtttgattgggaactgacccaggtgccaggcttggggggacaccggacaaccaaaggcaatatgtggactcggcaagccactggtccctaaacctgaataagtttccgggcagagctgcatttattgacggttatgaaagctgatttagaagcagcaacgcagcctcttgcctggaattgggatgatgcggctgaaaccaccttcctggcagccaaacaggctattcagcaggcacaagccctatgggtagctgatcggggcacccatttaaacttgatgtgcatgtgaccagatagttttgactggggcttatggcatcacacagagctctttagaatgccagtagacttttggtcccaactttggaagggagctgagctccagtattcctcgacagagaagcagttactaactgcatatgctgccctttagactcgtgacagcctggcaggatgggctacagtcgtcgcgcgcatgacttacccaatagcaggccccgagtgttctttcaactacctgccacccatccaacaactcccctcggacctcagtatgggctggaacctgacacttggcatgacagtgcagaccccaggcatccaaaccatgacagttccatcagctctccaaatgagactttgggattccagaagacagaggtttgagtgtaaaacacaaaataacaaaaccacaacaaaaacaactctgtattctcgtccccaccattaccatctctcctttgtgatgtcaaagagaccagaggaagtggacagactcggggaagaatagccagagtaagccttccaaattaaccccaggaatggcttcaacagaggaacagtacgatcttaagattgtgaaagtggaggaagaccctatctgggaccaagaaacccaccttcgagggaacaacttttctggccaagaagcctcccgacaactttttaggcagttttgttaccaagagactcctggtccccgagaagctctgagccggctccgagaactctgtcatcagtggctaaggccagaaatccacaccaaagagcaaatcttggagctgctggtgctggagcaattcctgactatcctgcctgaggagctccaggcctgggtgcgggagcaccatccggagagtggggaggaggctgtggctgtagttgaagatctggaacaagagcttagtgagccagggaaccaggctccagaccatgaacatggacattctgaagtgctcttggaggatgtggaacatctgaaggtcaagcaggaaccaacagacatacagcttcagcctatggtgacacagctcagatatgaatctttttgcctccaccaatttcaagaacaagatggtgaaagtatacctgagaaccaggagttggcatcaaagcaagaaatcttaaaagaaatggaacatttgggggatagcaaactccaaagagatgtatctttggattctaagtacagagaaacttgtaaacgagacagcaaggcagaaaagcagcaggcacattccactggagagagacgccacaggtgcaatgaatgtgggaaaagcttcactaagagttcagtactcattgagcaccagagaatccacactggggagaagccatatgaatgtgaagaatgtgggaaggccttcagccggaggtcaagcctgaatgaacatcggcggagccacactggagagaaaccctatcaatgtaaggagtgtgggaaagccttcagtgccagcaatggcctcactcgacacagaagaatccacacaggggaaaaaccatatgaatgcaaagtgtgtgggaaggctttcctcctcagctcatgccttgttcagcatcagaggatacacactggagagaagcgctatcagtgtcgtgagtgtggcaaagccttcattcagaatgcagggcttttccagcatctccgagtccacactggtgagaaaccctatcagtgcagtcagtgcagtaaactctttagtaagcggacacttcttaagaaacatcagaaaatccacactggagagagaccataagggtgatgagtttgggaaagccttcagtcatcattgcaaccttattaggcattttagaatccatactgttccagcagaactggactaattctgtggaccctcagacccctaaatggggccgtcttggaaagtaagattttcaagtggcttattctgttcttataaaatttattttgtattgcattgaaccacttgtctacaaaccaggtgttggtgtctcctgtgtggatgactgtgattgtagggggttgctgggtggccttcttattccctagcctttggtccatttcttatgatttcctttaaaggcaccaaatcttatctggaaataaattgttatggaggggctgtttttgagcaatactgcatattgaacaattctaaaagaccagtatctatgtatacttttaaaaaaaagatttgctaagatcaaaggatattcagaggtgcatctttttctgtaagagtgacattttaaacaaatgtaaggttttggggaataagaatcgtccacattcccacaggaaatcattgctatggtctcccctaggaatgtgatagatagcttctataattatgcagcattatccatagtatgaaacctgtagttttaatggtttagaaatctatgtctcatttcatatctaactcatgtttttgatacgaatcaatatatatgttgatatcatgagttaatatgagtttgacatgaatcatcaacatagtatatacatatcaacataactatgttgatgattcatatcaaattctcaatgcaggtcattactgtaagttttccatttttgttacaaataataagtaagatgatactttaaaatctctgttcttcacaaggtacctctttaattcatagccttttatgtcagcattattcttcttttgggggttggtcagcaactttgagtgccattgcaagcagcatcatttaagtagttttataaagaaaagaagtctgatatcttgggcagcttgctgcttactggggagaccagcatgcttagacacttattgccagggttaaacatatgctctggcaccaagttcaaatctttcctccccatttgtgagctgtgggactttaggcaagttatctaaatgctgctatgctatagtctccccacctgtaaaacagaggatgataccaataccttcctcatagggtacataagattaaataaatacaaacttgtacttaaaatgtagctctcaataaatatgcattatgatttacatacgaaataatagcatttaacaaatgtaggtagaattttaagtatcatgttaaaattaggatacgaaatgcctctgctgacattcttgttactcttttctccacagtcaaaacctgaatcagaatatttcaaaagagaggaaataaaagttcagcttaaaactgttctgccctaaa

SEQ ID NO: 436 - DNA, 4841 bp, Artificial Sequence
  SYT1
atctcggctccaccgcacccttcgcgggaagtccccaggcttccagcaaagctcagcttatcccgcccccgcttccaacccggaaccccagaagaacagcatgatgagcctccggcagccaggtgggccacctccccgcggctcagtttgaggacacttgtgcggaaccctttcacatccccaccctacccagctttcacaactccgccgggttaaatggccaaagacaaacttctacctctcctgtccccggtcccagcttttcaaaaacccacagctggcgaacccacacacatcgaaactcctaggtcgctgttgcagtctgggcatgctcagtatcagggctgcccctccaagagcggaggcagcgagagtacgcgtgtgcctcgcgccggtccacgcggggagagcactggggaccgagacccggcaccacctcccggtccgccctccagggaaaacgggaaaactagcaagagctagcaagaactagcaagagcttgaacaaacgcctggactcagattggaagactgctcatttgtctactgcctcattcctggaaattgcactggaactgtctgattaagaaaaacagaataattctgaaagaaagaaaacaaagaaaaacatactccagaattcctaatagaacacttcacctgaacctaaaatggtgagcgagagtcaccatgaggccctggcagccccgcctgtcaccactgtcgcgactgttctgccaagcaacgccacagagccagccagtcctggagaaggaaaggaagatgcattttctaagctgaaggagaagtttatgaatgagttgcataaaattccattgccaccgtgggccttaattgcaatagccatagtcgcagtccttttagtcctgacctgctgcttttgtatctgtaagaaatgtttgttcaaaaagaaaaacaagaagaagggaaaggaaaaaggagggaagaatgccattaacatgaaagatgtaaaagacttagggaagacgatgaaagatcaggccctcaaggatgatgatgctgaaactggattgacagatggagaagaaaaagaagaacccaaagaagaggagaaactgggaaaacttcagtattcactggattatgatttccaaaataaccagctgctggtagggatcattcaggctgccgaactgcccgccttggacatggggggcacatctgatccttacgtgaaagtgtttctgctacctgataagaagaagaaatttgagacaaaagtccaccgaaaaacccttaatcctgtcttcaatgagcaatttactttcaaggtaccatactcggaattgggtggcaaaaccctagtgatggctgtatatgattttgatcgtttctctaagcatgacatcattggagaatttaaagtccctatgaacacagtggattttggccatgtaactgaggaatggcgtgacctgcaaagtgctgagaaggaagagcaagagaaattgggtgatatctgcttctcccttcgctacgtacctactgctggtaagctgactgttgtcattctggaggcaaagaacctgaagaagatggatgtgggtggcttatccgatccttatgtgaagattcatctgatgcagaatggtaagaggctgaagaagaaaaagacaacaattaaaaagaacacacttaacccctactacaatgagtcattcagctttgaagtaccttttgaacaaatccagaaagtgcaggtggtggtaactgttttggactatgacaagattggcaagaacgatgccatcggcaaagtctttgtgggctacaacagcaccggcgcggagctgcgacactggtcagacatgctggccaaccccaggcgacctattgcccagtggcacaccctgcaggtagaggaggaagttgatgccatgctggccgtcaagaagtaaaggaaagaagaagcctttctgcatttgcccatatagtgctctttagccagtatctgtaaatacctcagtaatatgggtcctttcatttttccagccatgcattcctaacacaattcagtggtacttggaatcctgttttaatttgcacaaatttaaatgtagagagcccctaagtccttcatcataccactgccctccaaatctactcttcttttaagcaatatgatgtgtagatagagcatgaatgaaattatttattgtatcacactgttgtatataccagtatgctaaagatttatttctagtttgtgtatttgtatgttgtaagcgtttcctaatctgtgtatatctagatgtttttaataagatgttctattttaaactatgtaaattgactgagatataggagagctgataatatattatacggtaaatatagtatcgtctgcattccagcaaaaatatcaactcgtaaggcactagtacagttaaactgacatcttaaaggacaacttaaacctgagctttctattgaatcatttgagtaccaagataaacttacaccacatacttggtgggtgaatccaattttgtagaattcctacacaggcaaaatagcatgatctgagcagcagcatccaggctgacctcaaggaagcatagccacaaaacagaatagcacctgtctgtacatatttacaaagctaaaataatggcttcactcttatatttgaggaagcaactgaacaggagtcaatgatttcatattactgcatatagaataacaacaaggtgttccgtgtgtgtgtgtgtgtgtgtgtgtgtgtgtgtgtgcacatttgtttggggatgggggagaagaagctaaggggagaagtcaacatttatgaaatattgcctgactatttaaaaagaaaaaagtagctctccattatcacctttatacaaaatgtacatcctgtgaattctgttccagatttcacacctacaataattccaaaaggtttgcacattagagtttgtaacaaaatattttattatataaaaccaggttagaaggaatgcaggatatttttaacacaacaatctgtgcttattacacaaaattactttgtggtaaacagacagtattgtaatcccatcaaaagatgaaagaaaaacaaaaacaaaaaccaacaacaattagccatagttctgaatgcacttcaattaagccaaaacagacagctagtgatctttttatatgctctttttacttaagttttaatttgtcctttaaaaaaaggtgaaacaaaccaagaacaagttctagaaaactgaagcaacctcttatgtatactagatgcttgatttaggaggagtttttaaacgttttcaatgttattatgtagtaaatgacactattatgaagctactagtcattccataagagtcttaaaggactgctctgtgtaacactgtgactgccgtgtgtgcttagacccgtagtttcctcagtggatagcactcaatttattccgtagtgatattgtaacaatactgccattcccttctactgcactgcccaaggtgtgtgtagcacaaacagttctcattacaaaggaccaattcagaactgaaaagctatgcataggacaaggaagatacatagaatggggtggaacacagcattttgtcaagcactgtgcaatattccatatttttccccactatggtagacaaccatttcgtggaagggcagcctattatcccacactgcatctagccttttgtcccattcacttctgtgatccattttaatttccaggccacaagacagtagtgatgctctgaaatgaaagtttgtcttcacaaatatcaaaacaaaatggaggaaaactaagcattggcctcatgttcagtcttcaggatatcacaccacgtcttttcaaaaactaaagagaattcaaaaagggctgatggtaggctttgaacatggggttggctgtttcccagtaaaactggaattcctgtcgttactgtttccttatcaaagaaggggcaagctcttttgccttttaggccagacatagcaaacgctttataattggcatagacataaaggataaaaggaaaataaccgtctgccgatggtccgtacttcttaaaaaacataggtaatagaaaatatacacaagtcagaatgtgaaattaaataatggtttgaacagaaaattcaaacaagactctttccaatttaaagggccaaaccctaccaaagagagggagttgactggcttttaaaaagtatttaaataccacaaatgacatttaatttcactgtattcagctttaagttgttcacaatgaaaccacactttcaaacaagcaggttcaagctgctgaatagacattatttcttgcattaaaataccactaatgcattctcttgcaacactgccagacatgggattgtcaccatagaattagttggtactatgccatctttcactctttcacaagtcagtgatggaacctgctttatgaccaagattcatcctcaaataagccacatgtacccttctgacaaagctgtgtaaagtattagaatctgatgctctagaaagatcctagttgcctttgtgtatatttactgcctgcttgagtgtttctatgtgtgggttttccctgtatcttgtagaaatgttggggtgttttcctctgccatatggctcgtggcctgcgagccaactatttcagctgtattttaccttcatttttgatgaggtgatttaaattttgtttcactttgtgtagtgaattccacagtagttttctgattgttgttaaaaatgacttaacatattacacagatattcaataaaaatgttttatttcctgttgaaaaaaaaaaaaaaaaaa

SEQ ID NO: 437 - DNA, 1808 bp, Artificial Sequence
  MYOT
aagcacagagccactagattagtctgtgagggaaggagatgcctcttccttcccttcaatagtgggttaaacccagctggcaccctctggaactacgggaacaatattcttcaagagaaggtcactctaccaaagccaggagcacagtattctcaggatctcaacaaggaagagcagaccaagctatcaacagtcctcagctggccaacctataaatgcaaagccatcccaaactgcaaatgctaagcccataccaagaactcctgatcatgaaatacaaggatcaaaagaagctttgattcaagatttggaaagaaagctgaaatgcaaggacacccttcttcataatggaaatcaacgtctaacatatgaagagaagatggctcgcagattgctaggaccacagaatgcagctgctgtgtttcaagctcaggatgacagtggtgcacaagactcgcagcaacacaactcagaacatgcgcgactgcaagttcctacatcacaagtaagaagtagatcaacctcaaggggagatgtgaatgatcaggatgcaatccaggagaaattttacccaccacgtttcattcaagtgccagagaacatgtcgattgatgaaggaagattctgcagaatggacttcaaagtgagtggactgccagctcctgatgtgtcatggtatctaaatggaagaacagttcaatcagatgatttgcacaaaatgatagtgtctgagaagggtcttcattcactcatctttgaagtagtcagagcttcagatgcaggggcttatgcatgtgttgccaagaatagagcaggagaagccaccttcactgtgcagctggatgtccttgcaaaagaacataaaagagcaccaatgtttatctacaaaccacagagcaaaaaagttttagagggagattcagtgaaactagaatgccagatctcggctatacctccaccaaagcttttctggaaaagaaataatgaaatggtacaattcaacactgaccgaataagcttatatcaagataacactggaagagttactttactgataaaagatgtaaacaagaaagatgctgggtggtatactgtgtcagcagttaatgaagctggagtgactacatgtaacacaagattagacgttacggcacgtccaaaccaaactcttccagctcctaagcagttacgggttcgaccaacattcagcaaatatttagcacttaatgggaaaggtttgaatgtaaaacaagcttttaacccagaaggagaatttcagcgtttggcagctcaatctggactctatgaaagtgaagaactttaataactttaccaacattggaaaacagccaactacaccattagtaatatatttgattacatttttttgaaattaatccatagctgtattaacagattatggttttaattaggtaatatagttaatatatatttataatattatttatcctttgactcttgcacattctatgtacccctccgatttgtgaagcctacaggaaatctgggtatatggatttgtaactgcagaagactatcttaaaatacaggattttaacatttaagtcatgcacatttaacaattacaggttataaattagtatcaactttttaaacacatctaatgcttgtaataacgtttactggtactgctttctaaatactgttttacccgttttctcttgtaggaatactaacatggtatagattatctgagtgttccacagttgtatgtcaaaagaaaataaaattcaaatatttaaaacggaaaaaaaaaaaaaaaaaaa

SEQ ID NO: 438 - DNA, 3219 bp, Artificial Sequence
  POSTN
agactctcaggttgatgcagtgttccctcccacaactctgacatgtatataaattctgagctctccaaagcccactgccagttctcttcggggactaactgcaacggagagactcaagatgattccctttttacccatgttttctctactattgctgcttattgttaaccctataaacgccaacaatcattatgacaagatcttggctcatagtcgtatcaggggtcgggaccaaggcccaaatgtctgtgcccttcaacagattttgggcaccaaaaagaaatacttcagcacttgtaagaactggtataaaaagtccatctgtggacagaaaacgactgtgttatatgaatgttgccctggttatatgagaatggaaggaatgaaaggctgcccagcagttttgcccattgaccatgtttatggcactctgggcatcgtgggagccaccacaacgcagcgctattctgacgcctcaaaactgagggaggagatcgagggaaagggatccttcacttactttgcaccgagtaatgaggcttgggacaacttggattctgatatccgtagaggtttggagagcaacgtgaatgttgaattactgaatgctttacatagtcacatgattaataagagaatgttgaccaaggacttaaaaaatggcatgattattccttcaatgtataacaatttggggcttttcattaaccattatcctaatggggttgtcactgttaattgtgctcgaatcatccatgggaaccagattgcaacaaatggtgttgtccatgtcattgaccgtgtgcttacacaaattggtacctcaattcaagacttcattgaagcagaagatgacctttcatcttttagagcagctgccatcacatcggacatattggaggcccttggaagagacggtcacttcacactctttgctcccaccaatgaggcttttgagaaacttccacgaggtgtcctagaaaggatcatgggagacaaagtggcttccgaagctcttatgaagtaccacatcttaaatactctccagtgttctgagtctattatgggaggagcagtctttgagacgctggaaggaaatacaattgagataggatgtgacggtgacagtataacagtaaatggaatcaaaatggtgaacaaaaaggatattgtgacaaataatggtgtgatccatttgattgatcaggtcctaattcctgattctgccaaacaagttattgagctggctggaaaacagcaaaccaccttcacggatcttgtggcccaattaggcttggcatctgctctgaggccagatggagaatacactttgctggcacctgtgaataatgcattttctgatgatactctcagcatggatcagcgcctccttaaattaattctgcagaatcacatattgaaagtaaaagttggccttaatgagctttacaacgggcaaatactggaaaccatcggaggcaaacagctcagagtcttcgtatatcgtacagctgtctgcattgaaaattcatgcatggagaaagggagtaagcaagggagaaacggtgcgattcacatattccgcgagatcatcaagccagcagagaaatccctccatgaaaagttaaaacaagataagcgctttagcaccttcctcagcctacttgaagctgcagacttgaaagagctcctgacacaacctggagactggacattatttgtgccaaccaatgatgcttttaagggaatgactagtgaagaaaaagaaattctgatacgggacaaaaatgctcttcaaaacatcattctttatcacctgacaccaggagttttcattggaaaaggatttgaacctggtgttactaacattttaaagaccacacaaggaagcaaaatctttctgaaagaagtaaatgatacacttctggtgaatgaattgaaatcaaaagaatctgacatcatgacaacaaatggtgtaattcatgttgtagataaactcctctatccagcagacacacctgttggaaatgatcaactgctggaaatacttaataaattaatcaaatacatccaaattaagtttgttcgtggtagcaccttcaaagaaatccccgtgactgtctataagccaattattaaaaaatacaccaaaatcattgatggagtgcctgtggaaataactgaaaaagagacacgagaagaacgaatcattacaggtcctgaaataaaatacactaggatttctactggaggtggagaaacagaagaaactctgaagaaattgttacaagaagaggtcaccaaggtcaccaaattcattgaaggtggtgatggtcatttatttgaagatgaagaaattaaaagactgcttcagggagacacacccgtgaggaagttgcaagccaacaaaaaagttcaaggatctagaagacgattaagggaaggtcgttctcagtgaaaatccaaaaaccagaaaaaaatgtttatacaaccctaagtcaataacctgaccttagaaaattgtgagagccaagttgacttcaggaactgaaacatcagcacaaagaagcaatcatcaaataattctgaacacaaatttaatatttttttttctgaatgagaaacatgagggaaattgtggagttagcctcctgtggtaaaggaattgaagaaaatataacaccttacaccctttttcatcttgacattaaaagttctggctaactttggaatccattagagaaaaatccttgtcaccagattcattacaattcaaatcgaagagttgtgaactgttatcccattgaaaagaccgagccttgtatgtatgttatggatacataaaatgcacgcaagccattatctctccatgggaagctaagttataaaaataggtgcttggtgtacaaaactttttatatcaaaaggctttgcacatttctatatgagtgggtttactggtaaattatgttattttttacaactaattttgtactctcagaatgtttgtcatatgcttcttgcaatgcatattttttaatctcaaacgtttcaataaaaccatttttcagatataaagagaattacttcaaattgagtaattcagaaaaactcaagatttaagttaaaaagtggtttggacttgggaacaggactttatacctcttttactgtaacaagtactcattaaaggaaattgaatgaaattaaaaaaaaaaa

SEQ ID NO: 439 - DNA, 4109 bp, Artificial Sequence
  LRRFIP1
cgggccggggcggcgcgagcggctggagcaacgggccccgcggcagctgcgggcgacgcggtcgatggacatgggcacccagggatcggggcgcaagcggctccccaaccgggagcggctcacggcggaggacgacgcgctcaaccagatcgcgcgggaggcggaagcccggctcgctgcaaaacgggcggcccgcgcggaggctcgcgagatccgcatgaaggagctggagcggcagcagaaggagatctatcaggtccaaaagaaatattatgggctggatacaaaatggggtgacatcgagcagtggatggaagacagtgagcgctactctcgtagatccagaagaaacacatcggcttctgatgaagacgagcgcatgtcagtgggtagtcgtggaagcctgaggtcgcagcctgacttggagtatgggggtccttacgcctggacaaatggttatgatggagaattgtatggatcacagtccctgaatagaagatctggcaggccctcctgtctgtacagcgctgcccggccttcggggagttaccgggcgtctgtgttggatgaaggcagcttcggtgggacccgacggggcagcacctccggctcccgtgctccctcggagtacagcggccacctcaactccagctcccgcgcctcctccagggccagctcggcccgggccagccctgtggtagaagagagaccagaaaaagattttactgagaaggggtctcgtaacatgccgggcctgtctgcagccacgctggcctctctgggtgggacttcctctcggagaggcagcggagacacctccatctccatcgacaccgaggcatccatcagggaaatcaaggaactcaatgagttaaaggaccagattcaggatgtagaaggcaaatacatgcagggattgaaagagatgaaggactctctagcagaagttgaagagaaatataagaaggctatggtttccaatgctcagctagacaatgaaaagacaaacttcatgtaccaggttgataccctaaaagatatgttgctggagcttgaagaacagctggctgaatctaggcggcagtacgaagagaaaaacaaagaatttgaaagggaaaaacacgcccacagtatactgcaatttcagtttgctgaagtcaaggaggccctgaagcaaagagaggaaatgctcgaggaaatccgacagctacagcagaaacaggcgagttctatcagggagatttctgatcttcaggaaacaatagagtggaaagacaaaaagataggggcattagagaggcagaaagagttctttgattccgtaaggagtgaacgggatgatcttagagaagaagtagtcatgctgaaagaggaattaaagaaacatggaataatcctaaattcagaaatagctaccaatggagagacttccgacaccctcaataatgttggataccaaggtcctaccaagatgacaaaagaagagttaaatgccctcaagtcgacaggggatgggaccctagatattaggttgaaaaagctggttgatgaacgggaatgcttattggaacagattaagaaactcaaagggcagctggaggagagacagaagattggcaaactagacaatcttcgatctgaagatgatgtcttggaaaacgggacagacatgcatgtaatggacctacaaagggatgccaacagacagatcagcgacctcaaatttaaacttgcaaaatctgagcaagagataactgcattagaacaaaatgtaataaggttagagagtcaagtatcacgttacaaatcagcggctgaaaatgcagaaaaaatagaagatgaacttaaggcagaaaaacggaaactccaaagagagctccgctctgcattggataaaacagaagagctcgaggtgagcaacggccacttagtgaagcgtctggaaaaaatgaaagcaaatcggagtgcactcttgtcccagcagtaaattccagctctgatcaggcaactggttggtgactggagagcattgtttcataggcttttctctgtcctatctgggagcgctgcttcttcccctgccttccgagagacgaagaccgtggcgagcttggcgcttaggggctcccgtgccatggctcaccccagggagccccagcagccaccaggtgcctctgtctgcagacccctggcccgggctggcgccgacgctcagaacctgcaggtacttcataagcacacaggggcctcgagggagctctgtgtctgaccgcacagcagcctctgaatgccgctggaagtgatgatcaaagtaaagattcagttgggacttgagttttttttttttttcatgtgtcttgctgaagattaaggggaaatgttacagtgttgggacttcctttcatggcagaatctacaatttgagcgacttcagtagtatctcttagtctacgcttttcatacacaaaacactgtggaaccacaagccattaccaagcaaaactctttcactggaaacaagggggcagtctagaagtaaaagtgaccttaagaagactctttacaggcaacaaatgaagcttttctaagggatttttgcatcagttcagtcataagaatacttttttccagggtaattaggcaatagcttcactgaaaatgacagcttttcattgcattatttaatccttatatttggaattgaagtcgttaacttcttttaaagaatgtactattagaaaaattaaaaatgaaatgttgagagacttcagcaatgtggttctaatttttttccactgagaaagaagatctttaatttcatattaatggttctgtatattttgggtcatctttttattttttaagaatatcaagtcaattcatttttctttccctatttaaaaaaaaaggtgttttcacagaatgagtgcacttaaaaagtgaagtgaaggaggaggtaacagtagagacgatggcaatatcatcaaggacaaaagtaaaaacgtttagctacctgctgatttttagtgactgttcatatatgttgtatttcaagtatggctggtgaagccagtcagcttttcgggacgttagcaagtggaaactgagtcagtatcatccaaaaccatatctagtcttaacacatggagaatgctggagtgagggttgtgagttcagggtatataatcaagaaaacactcccagcataatgctaggggtcaccagtgtccatcccccagaactgtatggatctaggatatacacagctgcgttgcattaagaaagagatgaaatctctattaaaatacacaagatttttgtatctccttgtgcagaggatatttgccactgcccattgggaagcagacaagttatagggggctgggggccaacactggcaagtaggaaaccacgggtcggacaggtgagcaaaatgtgctggcaggtgggcaccactgggagacccacactgcacacccgggcaccgtatgaacaggaaagaggaaggaagctggacgaagcccctcagggaccctgtgctgaccatgctgggcccaccggcaaaagggagatattcagttccttgtctcatccttaaggtttcttccacaacatctgaatacaagcatgtttaactgggaaaatgtctatgtcatgcgtgaataacaccagcagcaaacactcacacatcacgcagacacggccggcagcatgctgacgcttttaggtatttttcactcatgcaattttcacatattttcactcatttcatttgcacggaaattctatgaggtagatgctgttatcaaatccacattacagatgagggacccagggtccaggaaggtgaactggcagaagtctcccagctggtagaacagggctgcaaggcatcgattcccaggtgtctcacagccctgagaagatggcgttttccctatcagtggctctgaggaagtcaagccttcagtctctacctctcccaccaattcttttggaaacagcaaaccaatgttacacacacttcctaatccagaggaagctagaacacgatttttaaatttatttagtaaaataaaactttttttgcagatgtaacgaaaaaaaaa

SEQ ID NO: 440 - DNA, 2180 bp, Artificial Sequence
  SERPINB2
gtaacaactctcagaggagcattgcccgtcagacagcaactcagagaataaccagagaacaaccagcatttcttgcactacaacttgcttaagctcttacacttcatagtgaagctatgcaccaccgagtgaagcgatgtggaacattggaaagagtgggcttccttagacagacctgggcttgaatccctgctccactacctaccagctgtgtgaccttatacaagttacttaatgtttctgagcatcaggatataatctataaaatagggagaatcacctctacctcatacagattctgcaaagattaaacgaggagaggagattgaaacaatggaggatctttgtgtggcaaacacactctttgccctcaatttattcaagcatctggcaaaagcaagccccacccagaacctcttcctctccccatggagcatctcgtccaccatggccatggtctacatgggctccaggggcagcaccgaagaccagatggccaaggtgcttcagtttaatgaagtgggagccaatgcagttacccccatgactccagagaactttaccagctgtgggttcatgcagcagatccagaagggtagttatcctgatgcgattttgcaggcacaagctgcagataaaatccattcatccttccgctctctcagctctgcaatcaatgcatccacagggaattatttactggaaagtgtcaataagctgtttggtgagaagtctgcgagcttccgggaagaatatattcgactctgtcagaaatattactcctcagaaccccaggcagtagacttcctagaatgtgcagaagaagctagaaaaaagattaattcctgggtcaagactcaaaccaaaggcaaaatcccaaacttgttacctgaaggttctgtagatggggataccaggatggtcctggtgaatgctgtctacttcaaaggaaagtggaaaactccatttgagaagaaactaaatgggctttatcctttccgtgtaaactcggctcagcgcacacctgtacagatgatgtacttgcgtgaaaagctaaacattggatacatagaagacctaaaggctcagattctagaactcccatatgctggagatgttagcatgttcttgttgcttccagatgaaattgccgatgtgtccactggcttggagctgctggaaagtgaaataacctatgacaaactcaacaagtggaccagcaaagacaaaatggctgaagatgaagttgaggtatacataccccagttcaaattagaagagcattatgaactcagatccattctgagaagcatgggcatggaggacgccttcaacaagggacgggccaatttctcagggatgtcggagaggaatgacctgtttctttctgaagtgttccaccaagccatggtggatgtgaatgaggagggcactgaagcagccgctggcacaggaggtgttatgacagggagaactggacatggaggcccacagtttgtggcagatcatccttttctttttcttattatgcataagataaccaactgcattttatttttcggcagattttcctcaccctaaaactaagcgtgctgcttctgcaaaagatttttgtagatgagctgtgtgcctcagaattgctatttcaaattgccaaaaatttagagatgttttctacatatttctgctcttctgaacaacttctgctacccactaaataaaaacacagaaataattagacaattgtctattataacatgacaaccctattaatcatttggtcttctaaaatgggatcatgcccatttagattttccttactatcagtttatttttataacattaacttttactttgttatttattattttatataatggtgagtttttaaattattgctcactgcctatttaatgtagctaataaagttatagaagcagatgatctgttaatttcctatctaataaatgcctttaattgttctcataatgaagaataagtaggtatccctccatgcccttctgtaataaatatctggaaaaaacattaaacaataggcaaatatatgttatgtgcatttctagaaatacataacacatatatatgtctgtatcttatattcaattgcaagtatataataaataaacctgcttccaaacaacaataaaaaaaaaaaaaaa

SEQ ID NO: 441 - DNA, 2565 bp, Artificial Sequence
  MUC7
actcaattacagtatttcctattcctaaaagaatctagtaggaaggctataagaaatgttctcttactgatccttcttatttgccaccttagattttaagttgcttcttggctaccaaaatgcctagacacagtaactaacaagaattcaactgacaagtagtttgaccagacttggaggaaggattccttcaaagttaccatcctcaaaggattggctaaaagcaagcaactggattgaacaccctaagaagaaagattcacactgcaccaggagacatcagaaagaatgaaaactctgccgctgtttgtgtgcatctgtgcactgagtgcttgcttctcgttcagtgaaggtcgagaaagggatcatgaactacgtcacagaaggcatcatcaccaatcacccaaatctcactttgaattaccacattatcctggactgctagctcaccagaagccgttcattagaaagtcctataaatgtctgcacaaacgctgtaggcctaagcttccaccttcacctaataacccccccaaattcccaaatcctcaccagccacctaaacatccagataaaaatagcagtgtggtcaaccctaccttagtggctacaacccaaattccatctgtgactttcccatcagcttccaccaaaattactacccttccaaatgtgacttttcttccccagaatgccaccaccatatcttcaagagaaaatgttaacacaagctcttctgtagctacattagcaccagtgaattccccagctccacaagacaccacagctgccccacccacaccttctgcaactacaccagctccaccatcttcctcagctccaccagagaccacagctgccccacccacaccttctgcaactacacaagctccaccatcttcctcagctccaccagagaccacagctgccccacccacacctcctgcaactacaccagctccaccatcttcctcagctccaccagagaccacagctgccccacccacaccttctgcaactacaccagctccactatcttcctcagctccaccagagaccacagctgtcccacccacaccttctgcaactaccctagacccatcatccgcctcagctccaccagagaccacagctgccccacccacaccttctgcaactacaccagctccaccgtcttccccagctccacaagagaccacagctgccccaattaccacacctaattcttccccaactactcttgcacctgacacttctgaaacttcagctgcacccacacaccagactactacttcggtcactactcaaactactactactaaacaaccaacttcagctcctggccaaaataaaatttctcgatttcttttatatatgaagaatctactaaacagaattattgacgacatggtggagcaatagtatattgtatgttgtaaagtgttctgtcatttacaagatgtgattcatgagtgcagaactaccacctttcttttagcaccaatcccaacatgaaattatattactcagatttaaagcactatcattaatctttcaatctaattattcaccaccacaagacctattaacaagacaaaatgcctctatcccacaagccagatgcaggtctggggttcaaaataactctttggatcctacagagatagcctactgagggcaaagaaagtccttagataaagagagaatattgtatgggccatcaaccatttacttttccctgaatgttagaaactacaaaaccactaccttgtacccccatcaaaatcccacctgaaccatctaatcctataaacataaaggggtaaaattggaactctccagatgaacaaagacatctaaatatctgtagatagaaacatttatctatctaaatatattgatagacctgtcattgtattgattaatgacaaaaccctttagataattatcttccattttaaataaaattttatttcacaaatatgagccaagaaagaggaaagttgatttgaagtgaggattagaagtgaatgacaataaagtctggcagccaagcacgaaccaagactggcactatttttcttagtgtatataattgtttaaactgcaaggttgacatttattgtgttgtgtctaagttaatttcgatctaatgtacctgattctagcctctgtgaacaacaagaatatgtttgtgtatgttcacatggtgcttataatatttcactatcaattcaattaattcacataaattccatgtgaaatgtattcaacaatggaatattttctaaaacatttagtatacatttgaatgtattttaaaccatgccaaactactgctttaatgtcaagtttgcagaattgtctctgaaaataaaaaccctgactttagttgtaaaacaataaaagttagctacttggtatacggagatgttaatttgggatatggaggcatttttatcttctgtcactactacttaaaactctgatgattatgttagatttttttgctaactaataaagatttcaaatggcaatttaaaaaaaaaaaaaaaaaaaaaaaaa

SEQ ID NO: 442 - DNA, 2595 bp, Artificial Sequence
  CPT1B
atttttagctctaaagccaccatcctcacgagactctggggccccccaggctcccagacctttgagcaaccttcaccgcacagaaacccagccgcgccctgcaattcccaccgcggaaggtgccgaccaacccccaggatggcggaagctcaccaggccgtggccttccagttcacggtgaccccagacggggtcgacttccggctcagtcgggaggccctgaaacacgtctacctgtctgggatcaactcctggaagaaacgcctgatccgcatcaagaatggcatcctcaggggcgtgtaccctggcagccccaccagctggctggtcgtcatcatggcaacagtgggttcctccttctgcaacgtggacatctccttggggctggtcagttgcatccagagatgcctccctcaggggtgtggcccctaccagaccccgcagacccgggcacttctcagcatggccatcttctccacgggcgtctgggtgacgggcatcttcttcttccgccaaaccctgaagctgcttctctgctaccatgggtggatgtttgagatgcatggcaagaccagcaacttgaccaggatctgggcttacctagagtctgtgcgccccttgttggatgatgaggaatattaccgcatggagttgctggccaaagaattccaggacaagactgcccccaggctgcagaaatacctggtgctcaagtcatggtgggcaagtaactatgtgagtgactggtgggaagagtacatctaccttcgaggcaggagccctctcatggtgaacagcaactattatgtcatggaccttgtgctcatcaagaatacagacgtgcaggcagcccgcctgggaaacatcatccacgccatgatcatgtatcgccgtaaactggaccgtgaagaaatcaagcctgtgatggcactgggcatagtgcctatgtgctcctaccagatggagaggatgttcaacaccactcggatcccgggcaaggacacagatgtgctacagcacctctcagacagccggcacgtggctgtctaccacaagggacgcttcttcaagctgtggctctatgagggcgcccgtctgctcaagcctcaggatctggagatgcagttccagaggatcctggacgacccctccccacctcagcctggggaggagaagctggcagccctcactgcaggaggaagggtggagtgggcgcaggcacgccaggccttctttagctctggaaagaataaggctgccttggaggccatcgagcgtgccgctttcttcgtggccctggatgaggaatcctactcctatgaccccgaagatgaggccagcctcagcctctatggcaaggccctgctacatggcaactgctacaacaggtggtttgacaaatccttcactctcatttccttcaagaatggccagttgggtctcaatgcagagcatgcgtgggcagatgctcccatcattgggcacctctgggagtttgtcctgggcacagacagcttccacctgggctacacggagaccgggcactgcctgggcaaaccgaaccctgcgctcgcacctcctacacggctgcagtgggacattccaaaacagtgccaggcggtcatcgagagttcctaccaggtggccaaggcgttggcagacgacgtggagttgtactgcttccagttcctgccctttggcaaaggcctcatcaagaagtgccggaccagccctgatgcctttgtgcagatcgcgctgcagctggctcacttccgggacaggggtaagttctgcctgacctatgaggcctcaatgaccagaatgttccgggagggacggactgagactgtgcgttcctgtaccagcgagtccacagcctttgtgcaggccatgatggaggggtcccacacaaaagcagacctgcgagatctcttccagaaggctgctaagaagcaccagaatatgtaccgcctggccatgaccggggcagggatcgacaggcacctcttctgcctttacttggtctccaagtacctaggagtcagctctcctttccttgctgaggtgctctcggaaccctggcgtctctccaccagccagatcccccaatcccagatccgcatgttcgacccagagcagcaccccaatcacctgggcgctggaggtggctttggccctgtagcagatgatggctatggagtttcctacatgattgcaggcgagaacacgatcttcttccacatctccagcaagttctcaagctcagagacgaacgcccagcgctttggaaaccacatccgcaaagccctgctggacattgctgatcttttccaagttcccaaggcctacagctgaagcccttaggtacctgtgttttgtttgggaactcggaggccctccccctcccccagctcagaccacagaggtggcaagagaagggctgaagctggaagactgttcatgagggacttgtgtgacctgctttgaaatgtgtgactctgctgagtgacgtaggctctgagatagctgtccacgcccacgtgtttgcttggaataaatacttgcctcagaaccttcaaaaaaaaaaaaaaaaaa

SEQ ID NO: 443 - DNA, 1383 bp, Artificial Sequence
  C12orf75
gggtgggtccggcgggtccccgggcggggcggggccggggcgaggggtgccgggtggtttccgcccggcagcccgcagcccgctgcgccccgggccgcgtctcccggcggtgggagggggcggcccccactcggttcctggcccctcgcggccccgtcagcctcccgctcggggtgcgccgcccttcgtctgggtctccgcccccaggacccgcggccgagagctccggagcgcggcttccccggccggctgcgcgatgggctgcgggaactccaccgccaccagcgcgggcgcgggccaaggccctgcaggagcagccaaagatgtaacagaagaatccgtaacagaagatgacaagaggagaaactatggaggagtatatgttggcctaccatctgaagctgtcaatatggtgtccagtcaaacaaagacggttcggaaaaattagaagaaaataacatcatgactcaagaatcaagagcttgctcatcagtttggaaggaatttggctccgtgggacgttgtaatgtgcacagacatttccaaggaaattctaaacagtcacccttcccttttgcattcccccaaatcttaagtgtatacataaaaccctgggtacatattgttgtggtaatagaagggaattggttaaacagtacacttgtttatggaactttctgtggccacctacgaaagacaagttaacaaactgtcatggaggctgttgttgcccagccagggccgctgcattttgacaacatttccaccctggccactcagcacatttcatggaggtcatgtcttttcactgatacttttttgatagtttttatataacaaaatccttattctatttataacttaagatgataaggcactataaattaatgacctaaaataatatatttgtctgttatcttttgctatttctacttcactttaatttttagctgtaaaattggtaaatggattcttacaactatctctttccatttcttactatttggttttcaaatttcatttaaatgtcagaatttccttttttaggaacaatgtgtatttcattgcactatttaaaaataaactcaaatttgcatgccatatgcacattttgattacatttttattttctttcgtgaaaggcatgtgcaactacaaatacttcatagctgtttgggttgctcattctacatcacgacaatctcatcatattatttctataacttttcaaggacttgcgatggatggttagtgggatatctggaaattaatttgataatgacttgtgtatctacttagtattgcaatgtaagttactcaattcaccaatgtatttcaacaattaaaacatttttatccctcttcaaaaaaaaaaaaaaaaaa

SEQ ID NO: 444 - DNA, 2438 bp, Artificial Sequence
  ADAMDEC1
agatgtgagtcctcaatgagctataaccacagccataaatatctctcaaagatgaggaacattctcatgatgttgacactgcaattttttgacaatttcccaacactcttaagaaacattccccaatctcacacgaaaagtgggggttttaattttcttgttcaacttctaaagagaaattggagaagataaaactggacactggggagaccacaacttcatgctgcgtgggatctcccagctacctgcagtggccaccatgtcttgggtcctgctgcctgtactttggctcattgttcaaactcaagcctcaaactgtgcgtggcctaaagtcagcattcaataaatatttgtgaaatgaatatttcagttttcacataaaagaaatatcagagaagcaatagccataaagcaaacacctgaattaacgctccatgaaatagtttgtcctaaaaaacttcacattttacacaaaagagagatcaagaacaaccagacagaaaagcatggcaaagaggaaaggtatgaacctgaagttcaatatcagatgatcttaaatggagaagaaatcattctctccctacaaaaaaccaagcacctcctggggccagactacactgaaacattgtactcacccagaggagaggaaattaccacgaaacctgagaacatggaacactgttactataaaggaaacatcctaaatgaaaagaattctgttgccagcatcagtacttgtgacgggttgagaggatacttcacacatcatcaccaaagataccagataaaacctctgaaaagcacagacgagaaagaacatgccgtctttacatctaaccaggaggaacaagacccagctaaccacacatgtggtgtgaagagcactgacgggaaacaaggcccaattcgaatctctagatcactcaaaagcccagagaaagaagactttcttcgggcacagaaatacattgatctctatttggtgctggataatgccttttataagaactataatgagaatctaactctgataagaagctttgtgtttgatgtgatgaacctactcaatgtgatatataacaccatagatgttcaagtggccttggtaggtatggaaatctggtctgatggggataagataaaggtggtgcccagcgcaagcaccacgtttgacaacttcctgagatggcacagttctaacctggggaaaaagatccacgaccatgctcagcttctcagcgggattagcttcaacaatcgacgtgtgggactggcagcttcaaattccttgtgttccccatcttcggttgctgttattgaggctaaaaaaaagaataatgtggctcttgtaggagtgatgtcacatgagctgggccatgtccttggtatgcctgatgttccattcaacaccaagtgtccctctggcagttgtgtgatgaatcagtatctgagttcaaaattcccaaaggatttcagtacatcttgccgtgcacattttgaaagataccttttatctcagaaaccaaagtgcctgctgcaagcacctattcctacaaatataatgacaacaccagtgtgtgggaaccaccttctagaagtgggagaagactgtgattgtggctctcctaaggagtgtaccaatctctgctgtgaagccctaacgtgtaaactgaagcctggaactgattgcggaggagatgctccaaaccataccacagagtgaatccaaaagtctgcttcactgagatgctaccttgccaggacaagaaccaagaactctaactgtcccaggaatcttgtgaattttcacccataatggtctttcacttgtcattctactttctatattgttatcagtccaggaaacaggtaaacagatgtaattagagacattggctctttgtttaggcctaatctttctttttacttttttttttcttttttctttttttttaaagatcatgaatttgtgacttagttctgccctttggagaacaaaagaaagcagtcttccatcaaatcaccttaaaatgcacggctaaactattcagagttaacactccagaattgttaaattacaagtactatgctttaatgcttctttcatcttactagtatggcctataaaaaaaataataccacttgatgggtgaaggctttggcaatagaaagaagaatagaattcaggttttatgttattcctctgtgttcacttcgccttgctcttgaaagtgcagtatttttctacatcatgtcaagaatgattcaatgtaaatatttttcattttatcatgtatatcctatacacacatctccttcatcatcatatatgaagtttattttgagaagtctacattgcttacattttaattgagccagcaaagaaggcttaatgatttattgaaccataatgtcaataaaaacacaacttttgaggc

SEQ ID NO: 445 - DNA, 1053 bp, Artificial Sequence
  TPM2
ggcggccgcaccccccggccgggccgtgcttctgcccctacaaggtttgggccgaggtgggggagggtcctggttgccggccccgcccggtccctccccgccttttaggcgcccgcgtggccgggacgtcccagtcccgctccgtcctcctcgcctgccaccggtgcacccagtccgctcacccagcccagtccgtccggtcctcaccgcctgccggccggcccaccccccaccgcagccatggacgccatcaagaagaagatgcagatgctgaagctggacaaggagaacgccatcgaccgcgccgagcaggccgaagccgacaagaagcaagctgaggaccgctgcaagcagctggaggaggagcagcaggccctccagaagaagctgaaggggacagaggatgaggtggaaaagtattctgaatccgagaaggcggctgatgagagcgagagaggaatgaaggtcatcgaaaaccgggccatgaaggatgaggagaagatggaactgcaggagatgcagctgaaggaggccaagcacatcgctgaggattcagaccgcaaatatgaagaggtggccaggaagctggtgatcctggaaggagagctggagcgctcggaggagagggctgaggtggccgagagccgagccagacagctggaggaggaacttcgaaccatggaccaggccctcaagtccctgatggcctcagaggaggagtattccaccaaagaagataaatatgaagaggagatcaaactgttggaggagaagctgaaggaggctgagacccgagcagagtttgccgagaggtctgtggcaaagttggagaaaaccatcgatgacctagaagagaccttggccagtgccaaggaggagaacgtcgagattcaccagaccttggaccagaccctgctggaactcaacaacctgtgagggccagccccacccccagccaggctatggttgccaccccaacccaataaaactgatgttactagcctctcaaggccctttaatccttaaaaaaaaaaaaaaaaaaaaaaaaaaaaa

SEQ ID NO: 446 - DNA, 1903 bp, Artificial Sequence
  MMP1
agcatgagtcagacagcctctggctttctggaagggcaaggactctatatatacagagggagcttcctagctgggatattggagcagcaagaggctgggaagccatcacttaccttgcactgagaaagaagacaaaggcaagttgaaaagcggagaaatagtggcccagtggttgaaaaattgaagcaaatgcaggaattctttgggctgaaagtgactgggaaaccagatgctgaaaccctgaaggtgatgaagcagcccagatgtggagtgcctgatgtggctcagtttgtcctcactgaggggaaccctcgctgggagcaaacacatctgacctacaggattgaaaattacacgccagatttgccaagagcagatgtggaccatgccattgagaaagccttccaactctggagtaatgtcacacctctgacattcaccaaggtctctgagggtcaagcagacatcatgatatcttttgtcaggggagatcatcgggacaactctccttttgatggacctggaggaaatcttgctcatgcttttcaaccaggcccaggtattggaggggatgctcattttgatgaagatgaaaggtggaccaacaatttcagagagtacaacttacatcgtgttgcagctcatgaactcggccattctcttggactctcccattctactgatatcggggctttgatgtaccctagctacaccttcagtggtgatgttcagctagctcaggatgacattgatggcatccaagccatatatggacgttcccaaaatcctgtccagcccatcggcccacaaaccccaaaagcgtgtgacagtaagctaacctttgatgctataactacgattcggggagaagtgatgttctttaaagacagattctacatgcgcacaaatcccttctacccggaagttgagctcaatttcatttctgttttctggccacaactgccaaatgggcttgaagctgcttacgaatttgccgacagagatgaagtccggtttttcaaagggaataagtactgggctgttcagggacagaatgtgctacacggataccccaaggacatctacagctcctttggcttccctagaactgtgaagcatatcgatgctgctctttctgaggaaaacactggaaaaacctacttctttgttgctaacaaatactggaggtatgatgaatataaacgatctatggatccaggttatcccaaaatgatagcacatgactttcctggaattggccacaaagttgatgcagttttcatgaaagatggatttttctatttctttcatggaacaagacaatacaaatttgatcctaaaacgaagagaattttgactctccagaaagctaatagctggttcaactgcaggaaaaattgaacattactaatttgaatggaaaacacatggtgtgagtccaaagaaggtgttttcctgaagaactgtctattttctcagtcatttttaacctctagagtcactgatacacagaatataatcttatttatacctcagtttgcatatttttttactatttagaatgtagccctttttgtactgatataatttagttccacaaatggtgggtacaaaaagtcaagtttgtggcttatggattcatataggccagagttgcaaagatcttttccagagtatgcaactctgacgttgatcccagagagcagcttcagtgacaaacatatcctttcaagacagaaagagacaggagacatgagtctttgccggaggaaaagcagctcaagaacacatgtgcagtcactggtgtcaccctggataggcaagggataactcttctaacacaaaataagtgttttatgtttggaataaagtcaaccttgtttctactgttttatacactttc

SEQ ID NO: 447 - DNA, 8689 bp, Artificial Sequence
  PEG3
gcagaagtctgggcagctgcgggaggagaggtttgggaggcgcgggagatgtccaccctgggctggtggcgccgccgggcgccgggcgccatgagggtgcgctaggcggctgttcgtgcccgaggctgcgcagcactgaggtgagctttgccttcttgatcttccgtccttcttggagacgactggcgagaggaagagggactaggtccaaacgctaggtggctgggtccaggtccctgagtactgacggtcacaggctgccgcgtctttcctgttgactcatgtttggttcctccagtgaaaattttacttagagaaatgctgcctccaaagcacttgtctgccaccaaacctaagaagtcctgggccccaaatctgtatgagctagacagtgacttgactaaggagccggatgtcatcataggagaaggtccaactgactctgagttttttcatcagaggtttcggaacctaatctatgtggaatttgttgggcctcggaagaccctgatcaaactccgaaacctctgcctcgattggttgcagccggagacccgcaccaaggaggagatcatcgagctcttggtccttgagcagtacctgaccatcatccctgaaaagctcaagccttgggtgcgagcaaaaaagccggagaactgtgagaagctcgtcactctgctggagaattacaaggagatgtaccaaccagaagacgacaacaacagtgacgtgaccagcgacgacgacatgacccggaacagaagagagtcctcaccacctcactcagtccattctttcagtgaccgggactgggaccggaggggcagaagcagagacatggagccacgagaccgctggtcccacaccaggaacccaagaagcaggatgcctccgcgggatctttcccttcctgtggtggcgaaaacaagctttgaaatggacagagaggacgacagggactccagggcttatgagtcccgatctcaggatgctgaatcataccaaaatgtggtggacctcgctgaggacaggaaacctcacaacacaatccaggacaacatggaaaactacaggaagctgctctccctcgtgcagcttgctgaagacgatggccactcccacatgacgcagggccactcatcaagatccaagagaagtgcctacccaagcaccagtcgaggtctaaaaactatgcctgaagccaaaaaatcaacccaccggcgggggatttgtgaagatgaatcttcccacggagtgataatggaaaaattcatcaaggatgtgtcacgcagttccaaatcgggaagagcaagggagtcaagcgaccggtcacagagattccccagaatgtcagatgataactggaaggacatttcattgaacaagagggagtcagtgatccagcagcgggtttatgaagggaatgcatttaggggaggctttaggtttaattcaacccttgtttccagaaagagagttcttgaaagaaagaggcgctatcattttgacacagatgggaagggctcgattcacgatcaaaaaggctgtcccaggaagaagccctttgaatgtggtagtgagatgagaaaagccatgagcgtgagcagcctgagcagcctcagctccccctcctttaccgagtcacagccaattgattttggggcaatgccatatgtatgtgatgagtgtgggaggtcgttcagtgtcatctcagaatttgttgagcaccagatcatgcatactagagagaacctctatgagtatggtgagtcctttatccacagtgtggctgtcagtgaagttcagaaaagtcaggttggagggaaacgttttgaatgtaaggactgtggagagaccttcaataagagtgccgccttggctgaacatcggaagattcatgctagaggttatcttgtggaatgtaagaatcaggaatgtgaggaagccttcatgcctagccccacctttagtgagcttcagaaaatatatggcaaagacaaattctacgagtgcagggtgtgtaaggaaaccttccttcatagttctgccctgattgagcaccagaaaatccactttggggatgacaaagataatgagcgtgaacatgaacgtgaacgtgaacgtgagcgcggggaaacctttaggcccagcccagcccttaatgagtttcagaaaatgtatggtaaagagaaaatgtacgaatgtaaggtgtgtggggagactttccttcatagctcatccctgaaagaacatcagaaaatccatactagagggaacccatttgaaaacaagggtaaagtgtgtgaggaaacctttattcctggtcagtcccttaaaaggcgtcagaaaacttacaataaggagaagctctgtgactttacagatggccgggatgccttcatgcaaagctcagagctcagtgagcatcagaaaattcattctcgaaagaacctctttgaaggcagagggtatgagaaatctgtcattcatagtgggccattcactgaatctcagaagagtcatactataacaagacctcttgaaagtgatgaggacgaaaaggcgttcaccattagctctaacccctatgaaaaccagaagattcccactaaggaaaatgtctatgaggcaaaatcatatgagaggtctgttattcatagcttagcctctgtggaagctcagaaaagtcacagtgtagcagggcccagtaaaccaaaagtaatggcagagtctaccattcagagcttcgatgctatcaaccatcagagagttcgtgctggagggaacacctctgaaggaagggaatacagtaggtctgttatccatagcttagtggcttccaaacctccaagaagtcacaatggaaatgaattggtggaatctaatgagaagggagaatcctccatttatatctcagaccttaatgataagcgacagaagattcctgccagagagaacccttgtgaagggggcagtaagaatcgcaactatgaagactctgtcatacagagtgtattccgtgccaaacctcagaaaagtgttcctggagagggatctggtgagtttaagaaggatggcgaattctctgttcccagctcaaatgtccgtgaataccagaaggctcgtgctaaaaagaaatacattgagcataggagcaatgagacctctgtaattcactctctgccttttggtgaacaaacatttcgccctcgagggatgctctatgaatgtcaggagtgtggggagtgctttgctcatagctctgacctcactgagcaccagaagattcatgatagggagaagccctctggaagcagaaactatgaatggtctgtcattcgcagcttggcccctactgaccctcaaacaagttacgcccaagagcagtatgctaaagagcaagcgcggaacaaatgtaaggacttcagacaattttttgctaccagcgaagacctcaacacaaaccagaaaatctatgaccaagagaagtctcatggcgaggagtctcaaggcgagaatactgatggggaggagacccacagcgaggagacccatggtcaggagacaattgaagaccctgtcattcaaggctcagacatggaagaccctcagaaggatgaccctgatgacaaaatctatgaatgtgaggactgtggcctgggctttgtggatctcacagacctcacagaccatcagaaagtccacagcaggaagtgcctggttgacagtcgggagtacacacattctgtaattcacacccattccatcagcgagtatcagagagattacactggagagcagctgtatgaatgtccaaagtgtggggaatcttttattcatagctcattccttttcgagcatcagagaatccatgaacaagaccagttgtattccatgaaggggtgtgatgatggttttattgccctcttgcccatgaagccacggaggaatcgtgctgcagagaggaatcctgctcttgctgggtcggccattcgatgccttttgtgtggacaaggcttcattcatagctctgcccttaatgagcatatgagacttcatagggaagatgatttactggagcagagccagatggctgaggaagctatcattccaggcttagccctcactgagtttcagagaagtcagaccgaagagagactctttgaatgtgcagtctgtggagaatctttcgtcaacccagcagaacttgcagatcacgtaactgttcataagaatgagccctatgagtacgggtcctcctatactcacacctcatttcttactgagcccctcaaaggagctataccattctatgaatgcaaggattgtggtaagtcctttattcatagcacagtcctcactaaacataaggagcttcatctggaagaagaagaagaagatgaagcagcagcagctgcagcagcagcagcccaggaagttgaagccaatgtccatgttccacaagtagttctgaggattcagggcttaaacgtagaggctgctgagccagaagtggaggctgccgagccagaagtggaggctgctgagccagaagtggaggctgctgagccaaacggagaggctgaagggccagatggagaggctgcagagcccattggagaggctggacagccaaatggagaggccgagcagccaaatggggatgctgatgagccagatggtgcaggtattgaagacccagaagaaagagctgaagagccagagggaaaagctgaagagccagagggagatgccgacgagcctgacggtgtgggaattgaagacccagaagaaggtgaagatcaagagattcaggtagaagaaccatactatgactgccatgaatgcacagaaaccttcacttccagcacagcattcagtgaacacctgaaaactcatgccagcatgatcatatttgagcctgcaaatgcctttggggagtgctcaggctacatcgaacgtgccagcaccagcacaggtggtgccaatcaagctgatgagaagtacttcaaatgtgacgtctgtgggcagctcttcaatgaccgcctgtccctcgccagacaccagaatacccacactggctgagggcatggggtaaaggttagaaaaccttcacctaggacttgacccttaccaaaccacagagaatccaaaccaatccatgataatgtcagtaggagacttaaccttagtgtgttacacacctgacttaacatctctaaactcagattgaaaagagaccgaatgtgcagattccacagtcttaagctttccccttcagatgtcagtgtctgcatgtgggaaagccatagcacacatcttacctttccaagtaatcagattgagaaaaccctatgagtattccagactacagagtttgcccaaatcaactgtaaatgacacttgtgtaacgtatatatagtgtttcatgaggtgtatataaaatagcaaattatgacagaacagtgatcacatatatttggatttatatgatatacagttacagtttactctgcagaggtaccttacctggtattctttgaattttttttttttttggaggaggaagagagcaacaaatttgattatatttttaagtgtcttagatcctgagaaagatttattgtgcattatttgaaccctgtcaatatctttttgagtaattgttttgtttcttacccttaaatagtcttgtgaagctgtaggcatgatagataacatggcttttactccttactgtttgaaaagataagtactttagcttctttctgcagccatttcatctgcgccaacactttggaacctaatactgtgtaaggctttacaatatacggattggctttttgtgacccagattgattggttgccacatgttatgtttgttgaagtggttctcatgcaaaaatattacacatttgtgttctgggttttttttttttttaaccaactcaatatgtgtttgatgatagtgaattgataaaacccgaagcttttccctgtaaatcttacatctttgcctttaaagaatgggttacaaccatcactagatcacagtagtgcctaatgaaggttgagaaccgtaggagaggctctcatgctgtaaataatgttgcaggctaataacctttcatcacttcctttgtgcgcttcctgccttaagtgacaagtagcaacatggcttgggtcccctgtgcagcatcagcttatgctgccacaagtcagtttgcaccctaggtgcccaggagctagtatccttagatctttctatcgctaacttaattctcttcgttatttatctgaccctctaactccatgtctaacttgcattaaaaaaaaaaaaattctttacagtcaacccaagcttaacatggactcaggttccccagcagccttaatttgttttgttaacatctgttccttctttttcagctctcctagagtatttctgagtgttgtgttcatctaatcttagtattcttttaattacaaattgacctcacagcttgaggtttcttgtgtcctattctgtggactacctgtgctcctttgcttcccctcccctcgcataataactatattaagaaattttttttggccttgagttggctggaaaaaaaatataaaatttaaaaaatttaaaaaaaaagatttgcaaaatgtaagtgtagatcatttgaacaagcaaaattaaagtacccactgggggaaatgtgtctgaatcttactcttctggatctgcaggattagggcttggaagtatgtcaaagatgcagggagtgtcaaagtttaggaagattgtagagctgagagcaagaagcagaaatgagtgagtcaaagaagggagtcctaatatatcaccagatctaggaggggagaggagacagacagaagaaaacaccagaggcaagaactgtagaaggccaggtttctgagaatgaattgagcggggtgtcctgagcagtttggaaaaggagtttttgatggtatggtgtaggtgagggctggctgcataggaaggactgaggttggaacggacatcgggaaagctgaggggcagtgaggtttactacatgggaaaaggactcttgaaacgagaatcagtgttgatgtcggggtgaactttgtgggtacattacttggtgttaacattgttggcagtggtagccccttttcagaaagcaacttgctgtaagtcagggtgtccgttccaaccttcagctagtgaaaaggtagtaacaaatggtaaacaagagaatgattgtttaaacctatctgtggacacttaatgcaactgtttaaaaatgataatcacgagttatgtagcaacgtggaaatatatttacagaacattaagtggagaaagcaggacacgaaagtatatttatactacagttataactcaacagttcatttatatgctgttcatttaacagttcatttaaacagttcattataactgtttaaaaatatatatgcttatagtcaaaagctgttgtggtgttgttgttgtaggcttatagttgagcattattttcttaaatttcttgaatgttctttatggtagtgttactaaaaagtttatgatcacattttcattgtgaacataatttgaactcattatcacacacttggaaaatacagaaaagtggaggaaaaaaaatcatatccccaccatccaaagacatatactctcctcttatcttgttcattcttgtttctgtgcacaggtttatgattataactgtgtcaaaatgtatattcaaaatagctgttacattacctttgtggaattatggttaaatactttcactttaattttttcaaatgttccctataataatgtcctgataacagtgtattatgtgtgtctccattggtgtgcataatacatacccagaggaaaaattagaaaataaagtaaattattttaaaaaattacctatattcccaacacctaacaactactgctaacatcttgatctgtttcctctatcttgtttcagtgcacacgcttgtgataacagtgttaaatatgtgtgcataaagtcttaaatgaaaagatgtggaaaataactaaaatagtgttgtcattgtgggaatttggttaaatattttgtctcaaattccttaaataatctttggtgttttggtaataaattttatgtatgtattttccattacaaatataatacatactcatacaaaactttggaaattcagtaaagaaaattcacacatattcccaacacccaacaacaattaactgttaacatcttgatctgtgcactagtctgtgattattagggtgttagtgataagtatgcataaatgtcaaagatgggaagaaagatgaaaaacaagaaatagttgtgtggttgttgtgggattatggttattttgtttcggtttccttgaaaggtcatcattctagtgttttggtagtccacctttactacatatatttccattatatatgaaatgtgttcattatagaaactttgaagttacagaaatgtagaagagaaactcacccatgttttcaccatccaaagagtgtggttaacatcttgatatattttcttcatcttgtttctgtgcacaggtttttggtttgttaatatggttgtggtcattctatctgtaatagtgtcaacaataaaaataaagttaaaaataaatatttaaaaaa

SEQ ID NO: 448 - DNA, 4576 bp, Artificial Sequence
  MPZL1
agcgagggccggagtggggctgaggcttcggtgcagagctggagagccgcggctgggaccggagtggggagcgcggcgtggaggtgccacccggcgcgggtggcggagagatcagaagcctcttccccaagccgagccaacctcagcggggacccgggctcagggacgcggcggcggcggcggcgactgcagtggctggacgatggcagcgtccgccggagccggggcggtgattgcagccccagacagccggcgctggctgtggtcggtgctggcggcggcgcttgggctcttgacagctggagtatcagccttggaagtatatacgccaaaagaaatcttcgtggcaaatggtacacaagggaagctgacctgcaagttcaagtctactagtacgactggcgggttgacctcagtctcctggagcttccagccagagggggccgacactactgtgtcgggcccagtcatatatgcacagttagaccactccggcggacatcacagtgacaagattaacaagtcagagtctgtggtgtatgcggatatccgaaagaattaagagaatacctagaacatatcctcagcaagaaacaaaaccaaactggactctcgtgcagaaaatgtagcccattaccacatgtagccttggagacccaggcaaggacaagtacacgtgtactcacagagggagagaaagatgtgtacaaaggatatgtataaatattctatttagtcatcctgatatgaggagccagtgttgcatgatgaaaagatggtatgattctacatatgtacccattgtcttgctgtttttgtactttcttttcaggtcatttacaattgggagatttcagaaacattcctttcaccatcatttagaaatggtttgccttaatggagacaatagcagatcctgtagtatttccagtagacatggccttttaatctaagggcttaagactgattagtcttagcatttactgtagttggaggatggagatgctatgatggaagcatacccagggtggcctttagcacagtatcagtaccatttatttgtctgccgcttttaaaaaatacccattggctatgccacttgaaaacaatttgagaagtttttttgaagtttttctcactaaaatatggggcaattgttagccttacatgttgtgtagacttactttaagtttgcacccttgaaatgtgtcatatcaatttctggattcataatagcaagattagcaaaggataaatgccgaaggtcacttcattctggacacagttggatcaatactgattaagtagaaaatccaagctttgcttgagaacttttgtaacgtggagagtaaaaagtatcggttttattctttgctgatgtcctttctgcttgaaataacagtcaccatacagctaaaggagaggagtttctttccttctaagtaggcagaaatggtatcattatgttgccgctctccaatctcccagagctcgctctctagagaatcaccttctttcgcttttttttttttttttgaggtagagtctcactatgttgcccagactagccttgaactcttgggctcaagtgattctccctcctcagcctcccgagtagctggaacgaactatagttgcaccactgcagctggcaagaatcaccttctttataaagcgtcagtcatgcttccagcaagaggcagcatcagtcatggctttataacagcttcatggtgcctcaaagactgttgaggttaatgagagcctagattagacagtttggctgtccttccctaaaacttgttttctcctattcactactccccaccgcacttaaaatctatgagtttttactttttactgggaatggaaagtgtggtgaagatcattcaacacttatgttgtcatttctcccattttctgaatttttttttaaatttccccccttttaaaattgttcgaaagcccacagttatggaaagaattactgtctagatggtctgcagaacgtgtttggggtgagtgggagtgaggggcaatgttactttttctccctgtagtttggagtccattatgagctgctgctttttcttctcatcttgtcatcttctggggatgtttgaaggctgagttccaacagaattcacaaagggaataaaacaggattgagattttgaggtgtgcacaaggtggtaagataaagggcatatgagcttcaaaactaatgctgttgcatacatgaagccttttgttttttgaggagctatttttgttattcttgtaacgctccaccttacatgccacatctgtgtgagtcaacagggatcaggtttggtcaccacacatgtctgaagctgggcagcgtctgctctgtgttctgtgtggaatggagaaaaaaacgcctgccctgctgccttccatgttcataggcccagcccaagagagtgacacacagtgctggccctgagacatttccacaaagtggtcaactctgccttgcatcctaaaactttttgggcatctattttgaaaactataggagcctttggaaggcctcttatgtttggaggggaagggtgttgagattgtcaccatccttcaagctgagactcctggtgagcctttgccaccatgaaaaccacatagctgaccagggctgtgcttgaggtacagaggacacacattgtagacaggcctgtgtcatgtttccttacagtcgttttttacagagaaaaggggcattgttttttcactgctttctcaacagttcctgtgaataaatgaaacatttcggagctccctgagagcaagagccttcacttcttcttgcggtgccgggaccatgtgttggtgaagctggtgctgtgggggccactcactcgaatgacacctggaggcctgttcctcccttaccactcccttccccagcccgacttcttggcctcctgcccaaccagacacctcaaactctgtcagtgccctggcattctggcagagaatcctcaccagttctcaccaaccttccccccaggcaagggcagctgccagcatggtgctctgccaggacaggtttccctgaaggaagctgctcacactgagatgagcctctcagggcaggacctcttcccaagccctgcacacccacccctgcagcccttttggctccccttttccctgtgcctcagcactcctttcctggttgcagataacgaactaaggttgcctaaagggcagatctgccctctccatgtcttcgtcctggcaaacagggtcgtcttaaaattatgcgctaattctgtatgggagcactcaaaaggcattacttagagattgaaatttcaaactatctctagtttttcaatggaaatatatcagctagggaaaaaccatcaagctcattattattttttgatcttcagttgtatttttgtgaatattttaatacatctttttcaatttctgaattgtgttgtgtgctcattttgaccagaatagaaaaagagatatgcctttcactcatatcattccagctacacctgccttcttttcttcaaaaatgccgtccgtgtgcctgcttctgggcctttgcacatgctgttccctgggcctgaagcatgccttctgccaatattcctgtggtttgctctctgacttcctttaagcctctgctcaaatgttacctcctcagggagaccttctgtgatatataaaagagcaagccccccaccccaccgcctcagccttcctggccccctcagttctgctctagttactctatttctctccctctttcccagtacacacttgtctgttctcccgcattagaacatagttaacaagagaccagaaccttgctgttttgttcactgctccgtctgcagtaaagggaacagcacctggcacttagctgctcaatacatgttacgtggatggatgagtaggtggaagcattcatccattcagcaacctacactgagaacaatcctgtgccaagcactgtgctaagcataaggaaacaaaacaagacaaagctcctcaaggagcttgccacagggtggaggtgacaggtgacatgaatggaagtaactagtagttaccaaatacttggtgtgagccaggcactttgcatttctttctctattatttctgtgagttaacagtaattgtactaatcttaatcccattgtttgaaagattatatggcttacccagggccacttagctaataaaggaacagagaagaggggctgggcctggggccgctgtttgatccacagccttgttcctaaccactatgccctgtggcctctcacaccaaaaggaagtaccaaactgcttccttactcaaataaatgtgctgaaatgcagttgcagttttctcccagtcccttaggagctggttagagagtcccttaggaacttgagagggtagtgtagtctaggtggtaggcacagatgtctgagagctttaacctcagtctggaagacaatgtggtgacttaatttgttgagaactatgttacaaataatgtgttactaataaaacattgaggcttcgcaaaaaaaaaaaaaaaaa

SEQ ID NO: 449 - DNA, 2115 bp, Artificial Sequence
  ETNPPL
aaaagggagatgatcctagctagttgacgccaccggtgacctccgacgccccgggcaagagaacgccaggagggataacgggaggaaggccggccggggccgccaaggcagtcccaggctcgcgtaggaggcgcgcagaccttgcaccttgcaccttcgcagcgccctgcaccccgccaccatgtgcgagctgtacagtaagcgggacactctggggctgaggaagaagcacatcgggccctcatgcaaagttttctttgcatcggatcccatcaaaatagtgagagcccagaggcagtacatgtttgatgagaacggtgaacagtacttggactgcatcaacaatgttgcccatggagtggtcaaagctgccctgaaacagatggaactgctaaatacaaattctcgattcctccacgacaacattgttgagtatgccaaacgcctttcagcaactctgccggagaaactctctgtttgttattttacaaattcaggatccgaagccaacgacttagccttacgcctggctcggcagttcagaggccaccaggatgtgatcactcttgaccatgcttaccatggtcacctatcatccttaattgagattagcccatataagtttcagaaaggaaaagatgtcaaaaaagaatttgtacatgtggcaccaactccagatacttacagaggaaaatatagagaagaccatgcagactcagccagtgcttatgcagatgaagtgaagaaaatcattgaagatgctcataacagtggaaggaagattgctgcctttattgctgaatccatgcagagttgtggcggacaaataattcctccagcaggctacttccagaaagtggcagaatatgtacacggtgcagggggtgtgtttatagctgatgaagttcaagtgggctttggcagagttgggaaacatttctggagcttccagatgtatggtgaagactttgttccagacatcgtcacaatgggaaaaccgatgggcaacggccacccggtggcatgtgtggtaacaaccaaagaaattgcagaagccttcagcagctctgggatggaatattttaatacgtatggaggaaatccagtatcttgtgctgttggtttggctgtcctggatataattgaaaatgaagaccttcaaggaaatgccaagagagtagggaattatctcactgagttactgaaaaaacagaaggctaaacacactttgataggagatattaggggcattggcctttttattggaattgatttagtgaaggaccatctgaaaaggacccctgccacagctgaagctcagcacatcatctacaagatgaaagaaaaacgagtgcttctcagtgccgatggacctcatagaaatgtacttaaaataaaaccacctatgtgcttcactgaagaagatgcaaagttcatggtggaccaacttgataggattctaacagttttagaagaagctatgggaaccaaaaccgaaagtgtgacctctgagaatactccatgcaaaacaaagatgctgaaagaagcccacatagaactgcttagggacagcaccactgactccaaagaaaatcccagcagaaagagaaatggaatgtgcacggatacacattcactgctcagtaagaggctcaagacatgactgatttgcattttaaagcaagatgcgatgtccagagttacagagaatgagtagatgtgtctcatcggttaatagctctattatacctctaaaggtggaattgtcagtttagattcataaatgaaaaggtaaatgagtaatcagaataaaccaagtgataatcaaaccatgtcaagattattagttcagactctagcctgttaattttcttagttgatttctgaagctacctgatttattctattaaattgtaagcttgcaaactcaaaataaattggcagatttacctctcatgttttaatgtgtcaaattagagagcaaagtataacaggtgccttcacttttgagacttagtgccttaaaatatgtattctataatgatttcatatataaaagtatatttattgactgtaataaaataaaatatgatgtaaacaaaaaaaaaaaaaaaa

SEQ ID NO: 450 - DNA, 2799 bp, Artificial Sequence
  SLC39A11
acgtgtgcgggagggaagcaggaagtgactgcgggagtggagccggcgagagagtggcagcgggggctgatggaagtgcagtgggggctggagagggcaccctactgtatccagcatgctccaaggccacagctctgtgttccaggccttgctggggaccttcttcacctgggggatgacagcagctggggcagctctcgtgttcgtattctctagtggacagaggcggatcttagatggaagtcttggctttgctgcaggggtcatgttggcagcttcctattggtctcttctggccccagcagttgagatggccacgtcctctgggggcttcggtgcctttgccttcttccctgtggctgttggcttcacccttggagcggcttttgtctacttggctgacctcctgatgcctcacttgggtgcagcagaagacccccagacgaccctggcactgaacttcggctctacgttgatgaagaagaagtctgatcctgagggtcccgcgctgctcttccctgagagtgaactttccatccggataggtagagctgggcttctttcagacaagagtgagaatggtgaggcatatcagagaaagaaggcggcagccactggccttccagagggtcctgctgtccctgtgccttctcgagggaatctggcacagcccggcggcagcagctggaggaggatcgcactgctcatcttggccatcactatacacaacgttccagagggtctcgctgttggagttggatttggggctatagaaaagacggcatctgctacctttgagagtgccaggaatttggccattggaatcgggatccagaatttccccgagggcctggctgtcagccttcccttgcgaggggcaggcttctccacctggagagctttctggtatgggcagctgagcggcatggtggagcccctggccggggtctttggtgcctttgccgtggtgctggctgagcccatcctgccctacgctctggcctttgctgccggtgccatggtctacgtggtcatggacgacatcatccccgaagcccagatcagtggtaatgggaaactggcatcctgggcctccatcctgggatttgtagtgatgatgtcactggacgttggcctgggctagggctgagacgcttcggaccccgggaaaggccatacgaagaaacagcagtggttggcttctatgggacaacaagcttctttcttcacattaaaacttttttccttcctctcttcttcatctcattatcctgattgactctgattataatagaaccatttttactttgctttgagggagatttttgatttaatggggaattttaaggtgtcatggaaatacagattctttgttttggccactgaatggactctctcttcagtgggattatcaaggaacttcagatcagggaaatctccacttcgggaccttctatctgcctcccaactcctcaaggtcacctatagaagcgagctaccaaaagacgtctcctaagcattttggtggcctagtgactcagggcagagtggccagcacacctctcatccgcccctcctgctccatcactgctgagcctctccccatctagaatgttggaactggagcatcataaagatagcaagctaccttccaaggccgagccagcccagagaggagcatgtcttcctttacctccccctaaggagatactacatgggagggggacacagaaaaagggaaggaaattggctagtctggctttttttttttttttttttaaaggcaaagattgacattattgaaggaaaggggatgaggacaactgtgaactcacagtgagccctgtggaaagaagagacagacagagtgtgggtttgttcggaggcctctgctgtcaatggattccaggagcaaggccatttgtcgcgctttccaaatttcttaggcatttattttgataagtttatagccatcatgtttctaagagacttggagacaccagcaaactgctagaactcaaactcttcaattactcaaagaaggagccatttcagttaactcaagtgaatgaaagagttttggaatctgctgtgggtccttccctgttgaccatttggtaacttataatctgacaaaaactcttgagctgcaacaggccttgccagagggctcaggatgggaaaggaagaaggggataggaaaagaagaggtaattttacatttcccctttaaagtaaattttagccaactcatcattctgaaatgtccctataaagaatgagtcgaactagaccagaagccagcctactccttcttacatagcttctccaacaggggtagcaatgacctgtccacttcaaacacagataaggcctgccatcctcattggttaaaggcacacgtgagactttcagtgggctctgctgagaaggaaggcagcccaggagtcaggtatgcaggcattgcattgtcagtgtctgctctcagagtttacacattcaattgcttccaagggtgaatctcctgctctgtgaatgctatcagaccccaaaggccaaccttgggctgggtctatgtacgttcttccgaagcactgatgatcaaaattgaagacacattcagaggtttgattggttgagattaactggtgtggtggttggtgtatgtatgttttatttttatgtctttgtatgtagttctacataatgcaaattgtgctttctgatggacaagacctcataactgtgattaatatcaataaaaaggggatgttgtggatgaaaaaaaaaaaaaaaaaa

SEQ ID NO: 451 - DNA, 3114 bp, Artificial Sequence
  SCEL
aagaaacctctgaactgttcactaatacagtcaggtagaggttgagactccactgaataaactctaggttcccatttctttcagccagatcctcccagggaatcactacaggctggttagccaaaaagtcctgattttctgctcaatagaggtccttactggaaggcagcatgtccaatgttaccttgagaaaaatgtctcccacaggaaatgagatgaagagcaccactcagggaaccacacggaagcagcaggattttcacgaggtgaacaaaagaagaactttcttacaggataacagttggataaagaaacgccctgaagaagaaaaagatgaaaattacggtagggtggtgctcaaccgacataattcccatgatgcattggacaggaaagtaaatgagagagatgtgccaaaagctacaattagtcggtacagttctgatgacactttggacaggatctcagacagaaatgatgctgctaaaacatataaggccaataccttggataaccaactaaccaataggagcatgtccatgtttagatcactggaagtaacaaagttgcaacctggcggttcattgaatgccaacacctccaacaccatagcatccacttctgctactactcctgtaaagaagaagagggaaccaggtgttcaccctccaatacctccaaagcccagttctcctgtttcttctcctaaccagctgagacaggataataggcagatacatccacctaaaccaggtgtatatacagaaaccaacagatctgctgaaagaaatataaggagtcaggatcttgataacatcgtcaaagtggccacttcacttcagagaagtgacaaaggtgaagaattggataatctcatcaaaatgaacaaaagcttgaataggaatcaaggtcttgatagtctcttcagagcaaatccaaaggtagaagaaagagagaaaagagccaaaagccttgaaagtctcatctatatgagtacccggacagataaagatggcaaaggaatccaaagccttggaagtccgattaaagttaatcaaaggactgacaaaaatgagaaaggaagacaaaatctcgaatctgttgctaaagtgaatgccaggatgaataaaacgagcagaagaagtgaagaccttgataatgctactgaagtaaatcccaaaggacatgaaaataccactgggggccagagccttgataatctcatcaaagtgacccctgaagtaaagagaagtaaccaaggttccaaagaccttaataacttcatcaaagtgtatccaggaacagaaaaaagtactgaagggggccaaagtctcgacagcctcattaaagtgactcctgaaagaaacagaactaaccaagggaaccaagacttggaaaatcttatcaaagtgatcccttcagcaaacaaaagcagtgaacaaggtcttgatgaacatattaatgtcagccccaaagctgtcaaaaacactgatggaaaacaagatcttgataaactcatcaaggtgaatcctgaaattttcacaaacaaccaaagaaaccaagatcttgctaacctcatcaaagtaaatcctgcagtaatcagaaacaatcagagccaagacttggacaatcttattaaagtgaaaccttcagctcttagaaacactaatcgagaccagaacctggaaaatttaattgaagtaaattctcatgtgtctgaaaacaagaatggaagctctaacactggagccaagcaggcaggaccacaggatactgttgtgtacacaaggacatatgtggagaatagtaaatcacccaaggatggatatcaggagaatatctctggaaaatacatacaaactgtttattcaacttctgataggtctgtcattgaaagagatatgtgcacttactgccgaaaacccttgggtgtagaaactaaaatgattttagatgaattacaaatttgctgccattctacttgctttaagtgtgaaatatgcaagcagcctttggaaaatctacaagcgggtgatagtatttggatttatagacagacaatacactgtgaaccttgctactctaaaattatggcaaagtggattccataactctggcacaaggaaatcaagatgaaaagcactcattaaggaattaaagttacaagttttatcttaataatatgtaatctagaaaagctttcacattgaagatcaactcttgtacaaaattaacaattctgttattgcataagtaatctaattgtcttcaataaggtcacacacataaaaagagccatctggtctctggctagagttagcaataaaaagttcaaatggttccagattccagtgtcaaaggagtgatgcattacactccagccaggtccatccctgctccgtatgttggctgtgagtggtggtttccatttaaaccaagtttctcatttcttcacctttttttctctaagaatttggattcgtagacattgacatcccgaagaactgtcaaggaagcaagatatgctttcttcatctgcaaaagaaatactaacaacaattttcttatacagtttggcagaaagatgttaacataaaaagtttatatacctcaaaaatcactaaactttccagatctctgtcctattatttgtaacacaaggggcattggataaaatgatttctagggttccttttgcttcccaaattctctgattctaaagcagtttttagaatcattagctctttggaaacatatatgcatacatgtttgttaagcctattgaactaggtaggacatataaacaatttaattttagtgtcattgtttaatcacagacttagtgtttgaaaactgtgttttaaaaacagaaacagattgatgggtaacaggtaaaatatgacatgtatagcttacatgttattatttgttaaattttctttgtatacatttcaaaatctgggtatacttataatccattagaagtaatggttatggactaaaaagatatgttctttagtatgttatatatactcatattacatagcagtatgtttacaaaaggcttataaaaataaaatgaactatcagttacatagaaaaaaaaaaaaaaaa

SEQ ID NO: 452 - DNA, 2476 bp, Artificial Sequence
  MAFF
cgggtcggtgacgtcaccgcatgactgggtttttatgaatgaaaggaatcctgtgagtgagtaattccgggaagctcgccttacaactccgcgcggcctcggccccctgcgccgcccgccccacaacaaaactcagcgcagcgctcccgggcgcccggttcagagcgacctgcggctcagagcggaggggagactgaccggagcgcggatcgggacagcggccgggacagcggcgagacgcgcgtgtgtgagcgcgccggaccaagcgggcccagaagcgggtgaggaacgcgggaccaggaggacggtctgcagcccagagggcaccttctgcaaacatgtctgtggatcccctatccagcaaagctctaaagatcaagcgagagctgagcgagaacacgccgcacctgtcggacgaggcgctgatggggctgtcggtgcgcgagctgaaccggcatctgcgcgggctctccgccgaggaggtgacacggctcaagcagcggcgccgcacactcaaaaaccgtggctacgccgccagctgccgcgtgaagcgcgtgtgccagaaggaggagctgcagaagcagaagtcggagctggagcgcgaggtggacaagctggcgcgcgagaacgccgccatgcgcctggagctcgacgcgctgcgcggcaagtgcgaggcgctgcagggcttcgcgcgctccgtggccgccgcccgcgggcccgccacgctcgtggcgccggccagcgtcatcaccatcgtcaagtccaccccgggctcggggtctggccccgcccacggcccggaccccgcccacggcccggcctcctgctcctagtgcccgcccccgccatgcctcagccacgcccctccggcctcagctccctccccaaagtgcctgagcgccgcctctgtgcccaggtcccatttctctgcagcactggccccttggtgcacacacattcccttcgtgggccctgtcttcctcttgcagccccccaaactgggaccgaatgaccctgggaaggggaacttgggtaggttggggatggggcagaggtctggatctgggatcgcccttggctgaaagtttagcctttttagattgagagatacagagccggcttagagaacagctgttgggggagaagagggcacccctcatcttggaaactgctcttattgtgccaatatgccctccaaaccctcccaggattcaaagctaggtttggctgtctgtgacttacgggaccgtcctgctgagaaattgcactgaagagatgcccccacctctggttgggcctgggggtgcctggccttccgaaactaaaagagtgggtgggaagactagtgaaacccagttcacggatggggaaacaggcctgaggtcacatttcacttagtggttgtgttgggaccaaaacctgggtgtcctcactgctgccctgagtccagccatggttttcagggggacagtggacagggactcagaaatgtggtgggagggcctccctggcttgggagaccgctctctgcaagggagggggagagaagcagagggagagagaaggtgacacggatggaagagtgggaaggagctggcctggctcagccctaggctgtccctgcagccagggtgtccgggggctggccagtcagagaaagggggccatggactgctgtggcaaatagggagacaaggagacagaccctgcagtcctactacagtctggagtggggtcctaagaagaagggtcccacctcaacccctgtcagtgtccactgtggggtgggggctgacccctgcctttgattgtcattctcctgggaagcccagtctcagtccctcccccaacactgtccacactgcccctccccactgtttatttattgcacggatctaagttattctccccagccagagcccgagctcctgctccctgggaaaagtggcgtatggccctgagctgggctttatattttatatctgcaaataaatcacattttatcttatatttagggaaagccggagagcaacaacaaaaaatgtttaagccgggcgcggtggctcacatctgtaatcccagcactttgggagtccaaggagggggatcgcttgagtccaggagtttgagaccagcctggacaacatggtgaaaccccatctctacaaaaaatacaaaaattagccatgcatggtggctcatgcctgtagtcccagctacttgggaggctgaggcaggaggatcacttaagcccagaaggcagaggttgtagtgagctgagatcgcaccactgcactccagcctgggcaacatagcaaaatcctgtctcaaaaaaaaagttaaaaaatattgcccggctcctagaatttatttatttcctgacttacagcaagcgagttatcgtcttctgtattttgtagactttctaaataaagtcaaattctttctttttccacagagaataaaaaaaaaaaaa

SEQ ID NO: 453 - DNA, 6753 bp, Artificial Sequence
  WWC1
gcggccgcccgggctaagagcggccggctggagccgctgagcccccgctgcggccgggagctgcatgggggagcgccggcagcgcttgggaagatgccccggccggagctgcccctgccggagggctgggaggaggcgcgcgacttcgacggcaaggtctactacatagaccacacgaaccgcaccaccagctggatcgacccgcgggacaggtacaccaaaccgctcacctttgctgactgcattagtgatgagttgccgctaggatgggaagaggcatatgacccacaggttggagattacttcatagaccacaacaccaaaaccactcagattgaggatcctcgagtacaatggcggcgggagcaggaacatatgctgaaggattacctggtggtggcccaggaggctctgagtgcacaaaaggagatctaccaggtgaagcagcagcgcctggagcttgcacagcaggagtaccagcaactgcatgccgtctgggagcataagctgggctcccaggtcagcttggtctctggttcatcatccagctccaagtatgaccctgagatcctgaaagctgaaattgccactgcaaaatcccgggtcaacaagctgaagagagagatggttcacctccagcacgagctgcagttcaaagagcgtggctttcagaccctgaagaaaatcgataagaaaatgtctgatgctcagggcagctacaaactggatgaagctcaggctgtcttgagagaaacaaaagccatcaaaaaggctattacctgtggggaaaaggaaaagcaagatctcattaagagccttgccatgttgaaggacggcttccgcactgacagggggtctcactcagacctgtggtccagcagcagctctctggagagttcgagtttcccgctaccgaaacagtacctggatgtgagctcccagacagacatctcgggaagcttcggcatcaacagcaacaatcagttggcagagaaggtcagattgcgccttcgatatgaagaggctaagagaaggatcgccaacctgaagatccagctggccaagcttgacagtgaggcctggcctggggtgctggactcagagagggaccggctgatccttatcaacgagaaggaggagctgctgaaggagatgcgcttcatcagcccccgcaagtggacccagggggaggtggagcagctggagatggcccggaagcggctggaaaaggacctgcaggcagcccgggacacccagagcaaggcgctgacggagaggttaaagttaaacagtaagaggaaccagcttgtgagagaactggaggaagccacccggcaggtggcaactctgcactcccagctgaaaagtctctcaagcagcatgcagtccctgtcctcaggcagcagccccggatccctcacgtccagccggggctccctggttgcatccagcctggactcctccacttcagccagcttcactgacctctactatgacccctttgagcagctggactcagagctgcagagcaaggtggagttcctgctcctggagggggccaccggcttccggccctcaggctgcatcaccaccatccacgaggatgaggtggccaagacccagaaggcagagggaggtggccgcctgcaggctctgcgttccctgtctggcaccccaaagtccatgacctccctatccccacgttcctctctctcctccccctccccaccctgttcccctctcatggctgaccccctcctggctggtgatgccttcctcaactccttggagtttgaagacccggagctgagtgccactctttgtgaactgagccttggtaacagcgcccaggaaagataccggctggaggaaccaggaacggagggcaagcagctgggccaagctgtgaatacggcccaggggtgtggcctgaaagtggcctgtgtctcagccgccgtatcggacgagtcagtggctggagacagtggtgtgtacgaggcttccgtgcagagactgggtgcttcagaagctgctgcatttgacagtgacgaatcggaagcagtgggtgcgacccgaattcagattgccctgaagtatgatgagaagaataagcaatttgcaatattaatcatccagctgagtaacctttctgctctgttgcagcaacaagaccagaaagtgaatatccgcgtggctgtccttccttgctctgaaagcacaacctgcctgttccggacccggcctctggacgcctcagacactctagtgttcaatgaggtgttctgggtatccatgtcctatccagcccttcaccagaagaccttaagagtcgatgtctgtaccaccgacaggagccatctggaagagtgcctgggaggcgcccagatcagcctggcggaggtctgccggtctggggagaggtcgactcgctggtacaaccttctcagctacaaatacttgaagaaacagagcagggagctcaagccagtgggagtcatggcccctgcctcagggcctgccagcacggacgctgtgtctgctctgttggaacagacagcagtggagctggagaagaggcaggagggcaggagcagcacacagacactggaagacagctggaggtatgaggagaccagtgagaatgaggcagtagccgaggaagaggaggaggaggtggaggaggaggagggagaagaggatgttttcaccgagaaagcctcacctgatatggatgggtacccagcattaaaggtggacaaagagaccaacacggagaccccggccccatcccccacagtggtgcgacctaaggaccggagagtgggcaccccgtcccaggggccatttcttcgagggagcaccatcatccgctctaagaccttctccccaggaccccagagccagtacgtgtgccggctgaatcggagtgatagtgacagctccactctgtccaaaaagccaccttttgttcgaaactccctggagcgacgcagcgtccggatgaagcggccgtccccacccccacagccttcctcggtcaagtcgctgcgctccgagcgtctgatccgtacctcgctggacctggagttagacctgcaggcgacaagaacctggcacagccaattgacccaggagatctcggtgctgaaggagctcaaggagcagctggaacaagccaagagccacggggagaaggagctgccacagtggttgcgtgaggacgagcgtttccgcctgctgctgaggatgctggagaagcggcagatggaccgagcggagcacaagggtgagcttcagacagacaagatgatgagggcagctgccaaggatgtgcacaggctccgaggccagagctgtaaggaacccccagaagttcagtctttcagggagaagatggcatttttcacccggcctcggatgaatatcccagctctctctgcagatgacgtctaatcgccagaaaagtatttcctttgttccactgaccaggctgtgaacattgactgtggctaaagttatttatgtggtgttatatgaaggtactgagtcacaagtcctctagtgctcttgttggtttgaagatgaaccgactttttagtttgggtcctactgttgttattaaaaacagaacaaaaacaaaacacacacacacacaaaaacagaaacaaaaaaaaccagcattaaaataataagattgtatagtttgtatatttaggagtgtatttttgggaaagaaaatttaaatgaactaaagcagtattgagttgctgctcttcttaaaatcgtttagattttttttggtttgtacagctccaccttttagaggtcttactgcaataagaagtaatgcctgggggacggtaatcctaataggacgtcccgcacttgtcacagtacagctaatttttcctagttaacatattttgtacaatattaaaaaaatgcacagaaaccattgggggggattcagaggtgcatccacggatcttcttgagctgtgacgtgtttttatgtggctgcccaacgtggagcgggcagtgtgataggctgggtgggctaagcagcctagtctatgtgggtgacaggccacgctggtctcagatgcccagtgaagccactaacatgagtgaggggagggctgtggggaactccattcagttttatctccatcaataaagtggcctttcaaaaagaatcttcctcttgctctctttttctttcctacccctcacttcatctgtttccctgatttttgactctcccctttccagtcatttctttcccacccatccgcagtcctggaaacatttattttttcttttgcccactgttttcatttgctcattaaattaaaatgactgctcggctcattgggaatccacatccccaagttagactggggatatgctctctgtactgtctccttctatggaattccaccccacccagagagagatgacttcacagtttgttcatatgagcatcatcccatgtcgtccccaacccaggggctggtaggtgctacagcttgtgcttcatgctgctcctgtggcccctattcctacccagctcagagctttgcagggtctactgcagacaatcagaagtcagtttctaacaaatagcaacagccacaaatctcttcctccttcctctctgacattaccctgtgcaacttttctcaaagtctgttgcaccactcagcaaagcaagttgcaccagctatatcagaatcacctggggcagcctattaaaaatgcagactgttgagaccatcctggctaacacggtgaaaccctgtctctactaaaaatacaaaaaattagccggccgtggtggcgggcagctactcgggaggctgaggcaggagaatgacctgaacctgggaggcagagcttgcagtgagctgagattgtgccactgcactccagcctgggtgacagagcaagactccgtctcaaaaaaaaaaaaaaaagaaaaatgcagactggctggcgcggtggctcatgcttgtaatcccagcactttgggaggctgaggcgggcagatcaactgagatcgggggttcgagaccagcctgatcaacatggagaaacctggtctctactaaaaatacataattagctgggcgtagtggcgcatacctgtaatcccagctacttgggtggccaaggcttgaacccaggaggcggaggttgcggtgagccgagatggcgccattgactccagcctgggcaacaagagcgtaactccatctcaaaaaaataataataataaaaataaaatgcagactgtcaggtcctctctagacccactgaactatcccgcccaccctgggacggtccccagtgccagtgttttacccatgttccctctgtaagtcttatgcacaccgcaatttgagagccccactggtataaagtgagtgaaacccaggcagagacaggcaaaatggtgaggcccgcatcctattggtgagtcacacagggaacgctgaaattcatggccttctccaggctactgggaacccatgggcggtgatggagggagtggtgccaccttcacttgctgctgaggctcttccccctctccccagcatactccttacctggctgtctctcctcatgtataaggaacctatagtggtgtagaatctactcttcttccccctgtggcttccaggcccccctgtatagctgctatccagcccgatttctcaccactggcccagggcttcctcctgccccgtggcttcacgtctctgaacacatcaatctctgatgttctctctccttccattgaattccaccagacacattcagggtttacttcgtaatgtcttcatatgagtatcaatcaacaccttccccaactcaattgtactaggttgtagagcacaaggatggtctcgtgctgctctgtggcacctgtgcctacactcctctgagctttgaggaggctgctctctttgctgaccccatgatcttttctgcccttctgttaagggcattggccacagcaacggggcaaatgccccaagctggctgtaagtgacccatccctttggctcccatgattagaccaaggagaggcatggggtccagctgagccattcagaaccattccttagcattttccactcaaaggttagagatgagattttctcttcccaaggctacctctggccatggttccagcttcatgggggcaatgggattaggaaaatgaggtcaacctgcaaaggaaagcagatgcaagagatggagacagaatgggggtgtcctggggatcttggagcctgaattcattggcacaaaaggcagcagcatcctcactgtatctgcagtccatttggactcaataaaaactttgaaagtcacatgtgttatggaattccttctcagtgacacattcatctgtgctcagttgtcccagcaagggtcagcccctcatacccctgcagcatccgctgctatgaagcagagctgtaaacgccctccctgtgtataggaaaagctacatggagcaaatcctcctgcctgaagaagtgcatctcagcatcacttcagctgtcggggcatttgtggggagaaccagaccacctctgcggaaggcagcagaccctcttccagccatggatggagttgaattctctataaacggttcaccagcaaaccaccaatacattccattgtttgcctagagagaaatttaaaaataaataaatgttcacttataaaaaaaaaaaaaaaa

SEQ ID NO: 454 - DNA, 2808 bp, Artificial Sequence
  TF
tggcaccgagcgagccgcgatgacaatggctgcattgtgcttcatgtcccttcccatcaacatttctgtgctggactccttccactcgcgggtcgtctccagagctcagaaaatgaggtgatcagtgggacgagtaaggaaggggggttgggagaggggcgattgggcaacccggctgcacaaacacgggaggtcaaagattgcgcccagcccgcccaggccgggaatggaataaagggacgcggggcgccggaggctgcacagaagcgagtccgactgtgctcgctgctcagcgccgcacccggaagatgaggctcgccgtgggagccctgctggtctgcgccgtcctggggctgtgtctggctgtccctgataaaactgtgagatggtgtgcagtgtcggagcatgaggccactaagtgccagagtttccgcgaccatatgaaaagcgtcattccatccgatggtcccagtgttgcttgtgtgaagaaagcctcctaccttgattgcatcagggccattgcggcaaacgaagcggatgctgtgacactggatgcaggtttggtgtatgatgcttacctggctcccaataacctgaagcctgtggtggcagagttctatgggtcaaaagaggatccacagactttctattatgctgttgctgtggtgaagaaggatagtggcttccagatgaaccagcttcgaggcaagaagtcctgccacacgggtctaggcaggtccgctgggtggaacatccccataggcttactttactgtgacttacctgagccacgtaaacctcttgagaaagcagtggccaatttcttctcgggcagctgtgccccttgtgcggatgggacggacttcccccagctgtgtcaactgtgtccagggtgtggctgctccacccttaaccaatacttcggctactcgggagccttcaagtgtctgaaggatggtgctggggatgtggcctttgtcaagcactcgactatatttgagaacttggcaaacaaggctgacagggaccagtatgagctgctttgcctggacaacacccggaagccggtagatgaatacaaggactgccacttggcccaggtcccttctcataccgtcgtggcccgaagtatgggcggcaaggaggacttgatctgggagcttctcaaccaggcccaggaacattttggcaaagacaaatcaaaagaattccaactattcagctctcctcatgggaaggacctgctgtttaaggactctgcccacgggtttttaaaagtcccccccaggatggatgccaagatgtacctgggctatgagtatgtcactgccatccggaatctacgggaaggcacatgcccagaagccccaacagatgaatgcaagcctgtgaagtggtgtgcgctgagccaccacgagaggctcaagtgtgatgagtggagtgttaacagtgtagggaaaatagagtgtgtatcagcagagaccaccgaagactgcatcgccaagatcatgaatggagaagctgatgccatgagcttggatggagggtttgtctacatagcgggcaagtgtggtctggtgcctgtcttggcagaaaactacaataagagcgataattgtgaggatacaccagaggcagggtattttgctgtagcagtggtgaagaaatcagcttctgacctcacctgggacaatctgaaaggcaagaagtcctgccatacggcagttggcagaaccgctggctggaacatccccatgggcctgctctacaataagatcaaccactgcagatttgatgaatttttcagtgaaggttgtgcccctgggtctaagaaagactccagtctctgtaagctgtgtatgggctcaggcctaaacctgtgtgaacccaacaacaaagagggatactacggctacacaggcgctttcaggtgtctggttgagaagggagatgtggcctttgtgaaacaccagactgtcccacagaacactgggggaaaaaaccctgatccatgggctaagaatctgaatgaaaaagactatgagttgctgtgccttgatggtaccaggaaacctgtggaggagtatgcgaactgccacctggccagagccccgaatcacgctgtggtcacacggaaagataaggaagcttgcgtccacaagatattacgtcaacagcagcacctatttggaagcaacgtaactgactgctcgggcaacttttgtttgttccggtcggaaaccaaggaccttctgttcagagatgacacagtatgtttggccaaacttcatgacagaaacacatatgaaaaatacttaggagaagaatatgtcaaggctgttggtaacctgagaaaatgctccacctcatcactcctggaagcctgcactttccgtagaccttaaaatctcagaggtagggctgccaccaaggtgaagatgggaacgcagatgatccatgagtttgccctggtttcactggcccaagtggtttgtgctaaccacgtctgtcttcacagctctgtgttgccatgtgtgctgaacaaaaaataaaaattattattgattttatatttcaaaaactccattctttcctaaatattttcaacaaaggatttctttatgcattctgcctaaatacctatgcaactgagcccttccttctcagctcaagattcgtctggtctttccctacagctttgtgtgtgccatggccacatctcctgggtacagttcaaggagacatcttttctaaaagggtctgcgtgatcattaaaatataatcaaatgtaaaaaaaaaaaaaaaaaa

SEQ ID NO: 455 - DNA, 26202 bp, Artificial Sequence
  NEB
aggcatcacgctggcttttgcctggggttctcaggaggggagagttgggagaggctttgctgctgaggaaatttatttggtagattgaaggtttgaacgagagctacagaaacgaaagaaaaagtctgtataagccaatggtgttcgggaagaaaataaccccattgccttgagtttgtaggtgccactactactctggaaaaatggcagatgacgaagactatgaggaggtggtggagtactacacagaagaagtggtttacgaagaggtgccgggagagacaataacaaaaatttatgagactacgacaacaaggacatctgactatgagcaatcagaaacttccaaaccagctctggcacagccagcactggcacagccagcatcagcaaagccggtggagaggaggaaggtcatccggaagaaagtggatccttcaaagttcatgaccccctacattgcacacagtcagaaaatgcaggatctttttagcccaaataaatacaaggagaagtttgagaaaacaaaaggacagccatacgccagcacaacagatactccagaacttcgcagaatcaaaaaagtacaagatcaactcagtgaggttaagtatcgaatggatggtgatgttgctaagactatatgtcacgtagatgaaaaagcaaaggatattgaacatgcaaagaaagtgtcgcagcaagtcagtaaggttttatacaagcagaactgggaagacaccaaggataagtacctgcttcctcctgatgcccctgaacttgtccaggccgttaagaacaccgccatgttcagcaagaaactgtacactgaagactgggaagcagacaaaagtttgttttacccctataatgatagcccggaactgaggagagttgcccaggcccagaaagctctcagtgatgttgcctacaaaaaaggtctcgctgaacagcaagctcaattcacgcctctggctgatcctccagatatagaatttgccaagaaagtaaccaatcaagtgagcaagcaaaaatacaaagaagactatgaaaataaaatcaaaggcaaatggagtgagacaccttgctttgaagttgcaaatgccagaatgaatgctgataacattagcacaaggaaataccaggaagattttgaaaacatgaaagaccagatctacttcatgcagaccgaaacaccagagtataaaatgaataaaaaagctggtgtggcagctagcaaggtaaaatacaaagaagactatgaaaagaataaaggaaaagcagattataatgtgcttcctgcttcagagaacccacagcttaggcagctgaaggcagcaggagatgccctaagtgacaaactatacaaggaaaactatgaaaagacaaaagcaaagagcataaattactgcgagacccccaaattcaagctcgatactgttctgcagaacttcagtagtgataaaaaatataaagattcctacttaaaagatattttgggacattatgtaggcagcttcgaggatccataccattcacactgcatgaaagtcacagctcaaaacagtgataaaaactacaaagcagaatacgaagaagacagaggcaaaggcttcttccctcagaccataactcaagaatatgaagcaattaagaaactagatcagtgtaaagaccacacctacaaagtccatccagataagacaaaattcacccaagttacagactctcctgttctgctacaagcccaagtcaattccaaacaactgagtgacttaaattacaaagcaaaacatgaaagtgaaaagttcaagtgccatatcccccctgatactcctgcttttatccagcacaaagtcaatgcctataacttgagtgataatctttataagcaagactgggagaagagcaaagccaaaaagtttgacattaaagtggatgccattcccctgctggcagccaaagccaacaccaagaacaccagcgatgtgatgtacaagaaagactatgaaaaaaacaaagggaaaatgattggagtcctcagcattaatgacgatcccaagatgctgcactccttgaaggtggccaaaaaccagagtgatagattatacaaggaaaactatgagaagacaaaggcaaagagtatgaattactgtgagaccccaaaatatcaacttgatactcagctgaagaacttcagtgaggctagatataaagacttatatgtaaaggatgttttgggacattatgtaggcagcatggaggacccatatcacacacactgcatgaaagttgcagctcaaaacagtgataaaagttacaaagcagaatatgaagaagataaaggaaaatgctatttccctcagacaataacacaagaatatgaagcaatcaagaagctggaccagtgtaaagatcatacctacaaagttcatccagataagaccaaattcacggcagtcactgattctcctgtactgttgcaagcccagctcaacacgaaacagcttagtgatctgaattacaaagcaaaacatgaaggtgagaagttcaagtgccatataccagcagatgctccacagtttatccaacacagagtcaatgcctataatctgagtgataatgtttataagcaagactgggagaagagcaaagccaagaagtttgacattaaagtggacgccattcccctgttggcagccaaagccaacaccaagaacaccagcgatgtgatgtacaagaaagactatgaaaagagcaaagggaaaatgattggagccctcagcattaatgacgatccaaagatgctgcactccttgaagacagccaaaaaccagagtgatcgcgaatatcgaaaagattatgaaaagtcaaaaactatctacacggcacctcttgatatgctccaagtcactcaagctaagaaatctcaggcaattgccagcgacgttgattataagcacatcttacacagttacagctacccccctgatagcatcaatgtggaccttgccaagaaggcatatgcgctgcagagcgatgttgaatacaaagctgactacaatagctggatgaaaggttgtggctgggtgccttttgggtccttagaaatggaaaaggcaaagcgagcttcagacatcctcaatgagaaaaaatatcgccaacatccagacaccctcaagtttacctcgattgaagatgctccaattacagtacagtctaaaattaaccaggcccagaggagtgatatcgcttacaaagccaaaggagaggaaattattcacaaatacaacctgccaccagacctgccccagttcatccaggctaaagttaatgcctacaatatcagtgagaatatgtacaaagcagacttgaaagacttgagcaagaagggatatgacctgagaactgatgcgattcccatcagagctgccaaagctgccaggcaggcggcgagtgacgttcagtacaaaaaagactatgaaaaggctaaagggaaaatggttggcttccaaagtcttcaagatgaccctaaactggttcattatatgaacgtggccaagatacaatcagatcgggagtataaaaaagactatgagaagacaaagtccaaatacaacacgccccatgatatgttcaatgtcgtggcggctaagaaagcccaggatgtggtcagcaatgtcaactataagcattctctccatcattacacctacttgcctgacgccatggacctggagctgtctaagaacatgatgcagatacagagtgataacgtctacaaggaagactacaacaactggatgaaaggcattggctggattcctattggcagtctcgacgtcgaaaaagttaaaaaggccggtgatgctctgaatgaaaagaagtacaggcaacatccagacaccctcaaatttaccagcattgtggactccccagttatggtccaggcaaaacagaacacgaagcaagtcagtgatatcttatacaaggctaaaggagaagatgtgaaacataaatacaccatgagtcctgatcttcctcagtttctccaggccaagtgcaatgcttacaatataagtgacgtctgttataaacgggattggcatgacttaatagccaagggcaacaatgtgctgggcgatgctattcccatcactgcagccaaggcatcgagaaacattgccagtgattataaatacaaggaagcttatgagaagtcaaagggaaagcatgtgggtttcagaagcctccaggatgatcccaagctggtccactatatgaatgtggcaaagctgcagtctgatcgtgaatacaagaagaactatgagaacaccaaaaccagctaccatacccctggggacatggttagcatcacagctgcaaagatggcccaggatgtcgctaccaatgtcaactacaaacagccattgcatcattacacatacctacctgacgccatgagtcttgagcatacgaggaatgtcaatcaaattcagagtgataatgtgtataaagacgagtataacagcttcttgaagggcatcggatggatccctattggttccctggaggtggagaaggtcaagaaagcaggcgatgcattaaatgagaggaagtatcgacagcacccagataccgtcaagttcacaagtgtgcctgattccatgggcatggtgttggctcagcataacacaaagcagctaagtgatttgaactacaaggtagagggagagaaactgaagcacaagtatactattgaccctgaattgcctcagtttattcaagccaaagtcaacgccctcaacatgagtgatgctcattataaagcagattggaagaaaaccattgccaagggctatgatttgagaccagatgccatcccaattgttgctgcaaaaagttcaaggaatattgctagtgattgcaaatataaggaggcctacgagaaagccaaaggcaagcaagttggatttctcagtcttcaggatgatcctaaactggttcactacatgaatgtggccaaaatccagtctgatcgtgagtacaaaaagggctatgaagccagcaagaccaagtaccacacacctctggatatggtcagtgtgacagctgcaaagaaatctcaggaggttgccaccaacgccaactacagacagtcataccaccactacactctcctgcccgatgccttgaatgtggagcactccaggaatgccatgcagattcagagtgataatctgtacaaatctgacttcaccaattggatgaaagggatcggctgggtgcccatagagtccctggaggtggagaaggcaaagaaagcaggagagattcttagtgagaagaagtatcgccagcaccccgagaagctgaagttcacttacgccatggacacaatggaacaggcacttaacaagagtaacaaactgaacatggacaagaggctctacactgaaaaatggaacaaggacaagaccaccattcatgtcatgcctgacacaccggatattttactctccagagtaaaccaaatcaccatgagtgataaactgtacaaagctggctgggaagaggaaaagaagaaaggatatgacctgaggcctgatgccattgcaataaaggctgcaagagcctctagagacattgccagtgattacaaatacaagaaagcctatgaacaagccaaagggaaacacattggcttccggagcctggaagatgaccccaagctggtgcacttcatgcaagtggccaagatgcagtcagaccgggaatacaagaagggatatgagaaatccaagacctccttccacaccccggtggacatgctcagtgtggtggcagccaagaagtctcaggaagtggccaccaatgccaactacaggaacgtgatccatacctacaacatgcttcctgatgccatgagctttgaattggccaaaaatatgatgcagattcaaagtgataatcagtacaaggctgactatgctgacttcatgaagggcattggatggctccctctgggctccctggaagcagagaaaaacaagaaagccatggagattattagtgaaaagaagtaccgccagcacccagacactttgaagtattccacactcatggactcgatgaacatggttttggcccagaataatgcaaaaattatgaacgaacatctctacaaacaagcatgggaggctgacaaaaccaaagtccacatcatgcctgatatcccccagattattttggcaaaggcaaatgcaattaatatgagtgataaactctacaaactttccttggaagagtctaaaaagaaaggctatgatctcagacctgatgcaattcctatcaaagctgccaaggcttccagagatattgcaagtgattataaatacaagtacaattatgaaaaagggaaggggaaaatggttggtttccgcagtctcgaggatgatcccaaattagtccattccatgcaagtggctaagatgcaatctgatcgggagtacaagaaaaactatgagaacacaaagaccagctaccacacccctgccgacatgctcagtgtcacggctgcaaaggatgcccaagccaacatcaccaacactaactacaagcacctgattcacaagtacatcctccttccagatgcaatgaacattgagctgaccaggaatatgaatcgcatacagagtgataatgaatataagcaagattacaatgaatggtacaaagggcttggctggagtccagcaggttctctggaagtggagaaggccaagaaagcaactgaatatgccagtgatcagaaataccgccagcacccgagcaacttccagtttaagaagctgactgattccatggacatggtgcttgccaagcagaatgcacataccatgaacaagcatttatacaccattgattggaataaagataagaccaagattcatgtgatgcctgatacaccagatattttacaagccaagcagaatcaaacactgtatagtcagaaactctataaacttggatgggaagaagctttgaagaaaggctatgatctcccagttgatgcaatttctgtacagctagctaaagcttcaagagacattgctagtgattataaatacaaacaaggctaccgaaagcaacttggccaccatgttggattccggagtctgcaagatgacccaaaacttgtgttgtccatgaatgtagccaaaatgcagagtgaaagagaatacaagaaggactttgagaagtggaaaactaagttctccagcccagtggacatgttgggagtggtactggccaagaagtgtcaggagttggttagtgacgtggactacaagaactacctgcatcagtggacatgtctgcctgatcagaacgatgttgtgcaagctaagaaagtttatgaactgcaaagtgagaatctatataaatctgaccttgagtggctgagaggcataggatggagtcccttgggttctttagaggcagaaaagaacaagcgggcttcggaaatcatcagtgagaagaaatatcgtcagcctccagacagaaacaagttcaccagcattcctgatgccatggatatagttctggcaaagacaaatgccaaaaataggagtgatagactttatagagaagcttgggacaaagacaagactcagatccacatcatgcctgatacacctgacattgttctggctaaagcaaacttaatcaacacaagtgataaactctaccgaatgggttatgaggagctgaagagaaaaggttacgatcttcctgttgatgccataccaatcaaagcagcaaaagcctcccgggaaattgccagtgaatacaagtacaaggaaggctttcgcaagcagctcggccaccacattggtgcccggaacattgaagatgaccccaagatgatgtggtccatgcatgtggccaagatccagagtgacagggagtacaagaaggactttgagaagtggaagaccaagttcagcagcccagtggacatgctgggggtggtgttggccaagaagtgccagaccttagtcagcgacgtggactacaagaactacctgcaccagtggacatgcctgcccgaccagagcgatgtcatccatgctcggcaggcctatgacctccagagcgataatttgtacaagtcagaccttcagtggctaaaaggcattggctggatgactagtggttctctcgaggatgagaaaaataaacgagccacccagattttgagtgaccatgtttaccgtcagcacccagatcaatttaagttttccagccttatggattccataccaatggttttggcaaaaaacaatgctattaccatgaatcatcgcctctatacagaagcttgggataaagataaaaccactgtccacattatgccagatacccctgaagttttattagctaaacaaaacaaagtaaattacagtgagaaattgtataagcttggcctagaagaagccaagaggaaaggttatgacatgcgggtagatgccattcctatcaaggcagccaaggcctccagagatattgcaagtgaattcaagtacaaagaaggctatcgtaagcagctcggccaccacattggtgcccgagctatacgtgatgaccccaagatgatgtggtccatgcacgtggccaagatccagagtgacagggagtacaagaaggactttgagaagtggaagaccaagttcagcagcccagtggacatgctgggggtggtgctggccaagaagtgccagaccttagtcagcgatgtggactacaagaactacctgcaccagtggacatgcctgcccgaccagagcgacgtcatccatgctcggcaggcctatgacctccagagcgataatatgtacaagtctgatctccagtggatgagaggcattggctgggtgtccattggctctttggatgtggaaaaatgcaaaagggcaactgaaattttgagtgataaaatctatcgccagcctccagacagattcaaatttaccagtgtgactgactctctggaacaagtgttggccaaaaataatgccatcactatgaacaagcgtttatacacagaagcctgggacaaagacaagactcagatccacataatgccagacacaccagaaattatgttggcaagaatgaacaaaatcaactacagtgagagtctgtacaaacttgctaatgaagaagcaaagaagaaaggctatgacttgcgaagcgacgccatccccatcgtggcggccaaggcctccagggacatcatcagtgactacaaatataaagatggttactgcaagcaacttggccaccatattggagcccggaacattgaagatgaccccaagatgatgtggtccatgcacgtagccaagatccagagtgacagggagtacaaaaaggactttgagaagtggaagaccaagttcagcagcccagtggacatgctgggggtggtgctggccaagaagtgccagaccttagtcagtgacgtggactataagaactacctgcacgagtggacatgcctgcctgaccagagcgatgtcatccatgctcggcaggcctatgacctccagagtgacaatatttacaagtcagatctccagtggctgagaggcattggctgggtccccattgggtctatggatgtggtcaagtgcaagagagctaccgaaatactgagtgataacatctaccgccagcctccggacaagctgaaatttaccagtgtgactgattctctagagcaggtgctggccaagaacaatgctctcaacatgaataagcgtttatacacagaggcctgggacaaagacaagactcaaattcacataatgcctgatacaccagagattatgttggcaaggcagaacaaaatcaactacagtgagactctatacaaacttgccaatgaagaagcaaaaaagaaaggctacgacttgcgaagtgacgccatccccatcgtggctgccaaggcctccagggacgttatcagtgattacaaatacaaagatggttaccgcaagcagctcggccaccacattggagcccggaacattgaagatgaccccaagatgatgtggtccatgcatgtggccaagatccagagtgacagggagtataagaaggactttgagaagtggaagaccaagttcagcagcccagtggacatgctgggagtggtgttagccaagaagtgccagaccttagtcagcgatgtggactacaagaactacctgcacgagtggacgtgcctgcccgaccagaatgatgtcatccatgctcggcaggcctatgacctccagagcgataacatttacaaatctgatctccagtggctgagaggcattggctgggtccccattgggtctatggatgtggtcaagtgcaagagagctgctgaaatactgagtgataacatctaccgccagcctccggacaagctgaaatttaccagtgtgactgactctctagagcaggtgctggccaagaacaatgctctcaatatgaacaagcgcttatacacagaagcctgggacaaagacaagacccaagtccatattatgcctgatacacctgaaatcatgttggcaagacaaaataaaataaattatagtgagagcctctatcgtcaggccatggaagaagccaagaaagaaggctatgacttgagaagtgatgccattcccattgtggctgccaaggcctctcgggatattgccagtgattacaaatacaaagaagcatatcgtaaacagttgggtcaccacattggcgcccgagcagtacacgatgaccccaagataatgtggtccctccacattgccaaagtgcagagtgaccgtgagtacaagaaagattttgagaaatacaagacaaggtacagcagcccagtggacatgcttggtatcgttttggccaagaagtgtcagaccttggtcagcgatgtggactataaacatcctctgcatgaatggatctgcctgcccgaccagaatgacatcattcatgcacggaaagcctatgacctccagagtgacaatttgtataagtcagaccttgaatggatgaaaggcattggctgggttccgattgattccttggaagttgttagggccaagagagctggagaattacttagtgatactatctaccgtcagcgtccagaaacgctgaaatttaccagtataacggacactccggagcaggtgctggcaaaaaacaatgctttaaacatgaataagcgcttatatactgaagcctgggacaatgacaagaaaactattcatgtcatgcctgatacaccagaaatcatgttagccaaactcaaccgaataaactacagtgataaactctataaacttgctttggaagagtccaagaaggaaggctatgacttgcgtctggatgccattccaatccaagcagccaaggcttcaagagatattgctagtgattacaagtacaaggaaggctaccgcaaacagcttggccaccatattggggcccggaacattaaggatgacccgaagatgatgtggtccatccatgtggccaagatccagagtgacagggagtacaagaaggagtttgagaagtggaagaccaagttcagcagcccagtggacatgctgggggtggtgctggccaagaagtgtcagatccttgtaagcgacatagactacaagcatcccctgcatgaatggacctgcctgcctgatcagaatgacgtcattcaggctcggaaggcctatgacctgcagagtgatgctatttacaaatctgatcttgagtggctgagaggcataggatgggttcccattggctctgtagaggtcgagaaagtgaagagagctggagaaatcctgagtgacaggaagtatcgccagcctgcagaccagctcaaattcacatgcattaccgacactccggaaattgtcctagcaaagaataatgccctgacaatgagcaagcatttatacacagaagcttgggatgctgacaaaacctccatccacgtgatgccagacaccccagatatcctgctggccaagagtaattctgccaatatcagccaaaaactttacaccaagggatgggatgaatcaaagatgaaggactatgatctgagagcagatgctatttccatcaaaagtgccaaggcctccagggacatcgccagtgactacaaatacaaggaagcctatgagaaacagaaaggccaccacattggagcccagagcattgaagatgatcccaagattatgtgtgccatacatgcaggaaaaattcaaagtgaaagggagtacaagaaggaattccaaaagtggaaaaccaagttctctagcccagtggacatgttaagcatcttgctggccaagaaatgtcagactttggtcactgacattgattatcgcaattacctgcatgaatggacatgcatgccggatcaaaacgacattatccaagcaaaaaaggcctatgacctgcagagtgatagtgtgtataaggcagacctggagtggctgcgtggcatcggctggatgccagaaggctcagtggaaatgaacagagtgaaggttgctcaagacctcgtgaatgaaagactctataggacacgtccagaagctttgtcattcaccagcattgtcgacactccagaagttgtcttggcaaaagccaattctctgcaaataagtgagaaactgtatcaggaagcctggaataaagataaaagcaacatcaccattccttctgatactccggagatgctgcaggcccacatcaatgccttgcaaatcagcaataaactctaccaaaaagactggaatgacgccaagcagaaaggctatgacataagggcagatgccattgaaatcaagcacgccaaggcctccagagaaattgccagtgagtacaaatacaaagaaggttaccgtaagcaactgggccaccacatgggtttccgcaccctacaagatgaccccaagtcagtatgggctatacatgctgccaagatccagagtgacagagaatataagaaagcttatgagaagtctaaaggaattcacaacacaccgttggacatgatgtcaattgttcaagccaagaaatgccaggtcctggttagcgacattgattatcgcaattatctgcaccagtggacgtgtctgccagatcagaacgatgtgatccaggccaagaaagcctacgacctgcagagcgataacttgtacaagtcagacctggaatggctgaagggtattggatggctgccagagggttctgtggaagtgatgagagtgaagaatgcccagaatctcttgaatgaaaggctgtatcgtataaagcctgaggccctcaaattcaccagcattgttgacaccccggaagtaatccaggcaaagatcaatgctgtacagatcagtgagccattgtatcgcgatgcctgggagaaagagaaggctaatgtgaacgtgccagctgacactcccctgatgctgcaatccaaaatcaatgccctgcagatcagcaataaacgctatcagcaagcttgggaagatgtcaagatgactggttatgacctgcgagcagatgccattgggatccagcatgccaaggcttccagggatattgccagtgactatctgtacaaaactgcttatgagaaacagaaaggccattacattggctgtcgcagcgccaaggaagaccctaaactggtttgggcagcaaatgtgttgaagatgcagaatgacaggctgtacaaaaaggcctacaacgaccacaaagccaagatctccatccctgtggacatggtgtccatcagcgctgccaaagaaggtcaggcactggcaagtgatgtggactatcgccattacctgcaccactggtcttgctttcccgaccagaatgatgtgatccaagccaggaaagcctacgacctacagagcgacagtgtgtataaggcagacctggagtggctgcgtggcatcggctggatgccagaaggctcagtggaaatgaacagagtgaaggttgctcaagacctcgtgaatgaaagactctataggacacgtccagaagctttgtcattcaccagcattgtcgacactccagaagttgtcttggcaaaagccaattctctgcaaataagtgagaaactgtatcaggaagcctggaataaagataaaagcaacatcaccattccttctgatactccggagatgctgcaggcccacatcaatgccttgcaaatcagcaataaactctaccaaaaagactggaatgacaccaagcagaaaggctatgacataagggcagatgccattgaaatcaagcacgccaaggcctccagagaaattgccagtgagtacaaatacaaagaaggttaccgtaagcaactgggccaccacatgggtttccgcaccctacaagatgaccccaagtcagtatgggctatacatgctgccaagatccagagtgacagagaatataagaaagcttatgagaagtctaaaggaattcacaacacaccgttggacatgatgtcaattgttcaagccaagaaatgccaggtcctggttagcgacattgattatcgcaattatctgcaccagtggacgtgtctgccagatcagaacgatgtgatccaggccaagaaagcctacgacctgcagagcgataacttgtacaagtcagacctggaatggctgaagggtattggatggttgccagagggttctgtggaagtgatgagagtgaagaatgcccagaatctcttgaatgaaaggctgtatcgtataaagcctgaggccctcaaattcaccagcattgttgacaccccggaagtaatccaggcaaagatcaatgctgtacagatcagtgagccattgtatcgcaatgcctgggagaaagagaaggctaatgtgaacgtgccagctgacactcccctgatgctgcaatccaaaatcaatgctctgcagatcagcaataaacgctatcagcaagcttgggaagatgtcaagatgactggttatgacctgcgagcagatgccattgggatccagcatgccaaggcttccagggatattgccagtgattatctgtacaaaactgcttatgagaaacagaaaggccattacattggctgtcgcagcgccaaggaagaccctaaactggtttgggcagcaaatgtgttgaagatgcagaatgacaggctgtacaaaaaggcctacaacgaccacaaagccaagatctccatccctgtggacatggtgtccatcagcgctgccaaagaaggtcaggcactggcaagtgatgtggactatcgccattacctgcaccactggtcttgctttcccgaccagaatgatgtgatccaagccaggaaagcctacgacctacagagcgacagtgtgtataaggcagacctggagtggctgcgtggcatcggctggatgccagaaggctcagtggaaatgaacagagtgaaggttgctcaagacctcgtgaatgaaagactctataggacacgtccagaagctttgtcattcaccagcattgtcgacactccagaagttgtcttggcaaaagccaattctctgcaaataagtgagaaactgtatcaggaagcctggaataaagataaaagcaacatcaccattccttctgatactccggagatgctgcaggcccacatcaatgccttgcaaatcagcaataaactctaccaaaaagactggaatgacaccaagcagaaaggctatgacataagggcagatgccattgaaatcaagcacgccaaggcctccagagaaattgccagtgagtacaaatacaaagaaggttaccgtaagcaactgggccaccacatgggtttccgcaccctacaagatgaccccaagtcagtatgggctatacatgctgccaagatccagagtgacagagaatataagaaagcttatgagaagtctaaaggaattcacaacacaccgttggacatgatgtcaattgttcaagccaagaaatgccaggtcctggttagcgacattgattatcgcaattatctgcaccagtggacgtgtctgccagatcagaacgatgtgatccaggccaagaaagcctacgacctgcagagcgataacttgtacaagtcagacctggaatggctgaagggtattggatggttgccagagggttctgtggaagtgatgagagtgaagaatgcccagaatctcttgaatgaaaggctgtatcgtataaagcctgaggccctcaaattcaccagcattgttgacaccccggaagtaatccaggcaaagatcaatgctgtacagatcagtgagccattgtatcgcgatgcctgggagaaagagaaggctaatgtgaacgtgccagctgacactcccctgatgctgcaatccaaaatcaatgccctgcagatcagcaataaacgctatcagcaagcttgggaagatgtcaagatgactggttatgacctgcgagcagatgccattgggatccagcatgccaaggcttccagggatattgccagtgactatctgtacaaaactgcttatgagaaacagaaaggccattacattggctgtcgcagcgccaaggaagaccctaaactggtttgggcagcaaatgtgttgaagatgcagaatgacaggctgtacaaaaaggcctacaacgaccacaaagccaagatctccatccctgtggacatggtgtccatcagcgctgccaaagaaggtcaggcactggcaagtgatgtggactatcgccattacctgcaccgctggtcttgctttcccgaccagaatgatgtgatccaagccaggaaagcctacgacctacagagcgacgccctctacaaggctgacttggagtggttgcgtggcattggctggatgccccaagggtctcctgaagtgttgagagtcaaaaacgcccagaatatcttttgtgacagtgtctatcggacgcctgtggtgaaccttaagtacacaagcattgttgacacacctgaagtggtccttgctaaatcaaatgctgaaaatattagtattccaaagtacagagaggtttgggacaaggataaaacttcaatacacataatgccagatactccagaaattaatctcgctagagcaaatgctcttaatgtgagcaataaactttaccgtgagggctgggatgaaatgaaggcgggctgtgatgtccggctggatgccatccccatccaggctgccaaggcctccagggagattgccagtgactataaatataagcttgaccatgagaagcagaagggacactacgtgggcaccctcacagccagggatgacaacaagatccgctgggccctcatagctgacaagctccagaatgaacgagagtaccggctggactgggccaaatggaaggccaagatccagagccctgtggacatgctttccatcctgcactctaaaaattcccaggctctggtcagtgacatggattaccgcaattacctgcaccagtggacctgcatgcccgaccagaacgatgtgattcaggccaagaaggcctacgaactgcagagcgataatgtttacaaggctgacttggaatggttgcgtggaattgggtggatgccaaatgactccgtgtccgtcaatcatgccaaacatgccgcggacatcttcagtgagaaaaaatatcgcacaaaaatagaaactctcaactttacgcctgtggatgacagagttgattatgtgacagcgaaacaaagtggcgagatcctcgatgatattaaataccggaaagactggaatgccaccaaatcaaagtacaccctcacagaaacccccctgctgcacactgcccaggaggctgctaggatactggaccagtatctctacaaggaaggctgggagagacaaaaagccacaggttacattttgcctccagatgctgtgccatttgttcatgcccatcactgcaatgacgttcagagtgagctgaaatacaaagctgaacatgtgaagcaaaaaggtcattatgttggtgtcccgacgatgagagatgatcctaagctggtttggtttgagcatgcaggccagattcagaatgagagactatacaaagaggactatcacaaaacaaaggccaaaatcaatatacctgctgatatggtgtcagtcttggccgccaagcaggggcagacccttgtcagtgatattgattatcgtaattacttgcaccaatggatgtgtcatcctgaccagaacgatgttattcaggcaagaaaggcctatgacctacagagtgataatgtctacagagctgacctggagtggctccgaggcattggctggatcccactggattctgtggaccatgtaagggttactaagaaccaggaaatgatgagtcagatcaaatataagaaaaatgcccttgaaaactatcctaactttagaagtgtggtggatcctccagagattgttttagccaagattaattctgtcaatcaaagtgatgtaaaatataaagaaacatttaataaagcaaagggcaaatatacgttttcaccagatacaccacatatctcccactccaaagacatgggaaaactctacagtactatactgtataaaggggcgtgggagggcaccaaggcctatggctacaccctggatgagcgctacattcccattgttggagccaagcatgctgatctggtgaacagtgagcttaaatacaaagagacatatgagaagcagaaaggtcactacctggctggaaaagtgatcggtgaattccctggtgtggttcactgtctggatttccaaaagatgaggagtgcgttgaactacagaaaacattatgaggataccaaagcaaatgttcatatccccaatgacatgatgaatcacgtgctggctaaaaggtgccagtacatcctcagtgacctggagtatcgacactatttccaccagtggacgtctcttctggaagaacccaatgttatacgcgtccgaaacgcccaggagatcttgagtgataatgtgtataaagatgacctgaattggttgaaaggcattggttgctacgtttgggatacaccccaaatcctccatgccaagaaatcatacgaccttcagagtcagctacaatatacagcagcaggtaaagaaaatctacaaaactataatctggtcacagacacgcccctctatgtgactgctgttcagagtggcattaatgccagtgaggtaaaatataaagaaaattatcatcagattaaggacaaatacacaacagttctagaaacagtggattatgacagaaccagaaacctgaagaatctttacagcagtaacctgtacaaggaggcctgggatagagtgaaagccaccagctacatcctgccttccagcaccttgtccctgacacacgccaagaaccagaagcatctggccagccatatcaaatatcgggaagaatatgaaaagttcaaagctctttatacgttaccaagaagtgttgacgatgatccgaacacagcacggtgcctccgagttggcaagcttaacatcgatcgcctgtacagatcagtttatgaaaagaacaagatgaaaatccacatcgtgcccgacatggtagagatggttactgccaaggattcccagaagaaagtcagtgagattgattaccgcctgcgcctccacgaatggatttgccaccccgacttgcaagtcaatgatcacgtcaggaaagtcacagatcagatcagcgatattgtatacaaggatgacctcaactggctgaaaggcattggttgctacgtctgggacactcctgaaatcctccatgccaagcatgcttatgatctacgtgatgatatcaagtataaagctcacatgttgaaaacaaggaatgactacaagcttgtcacagatacaccagtctacgtgcaggctgtcaaaagtgggaaacagctaagtgacgctgtctaccactatgactatgtgcacagtgtcagaggcaaagtggctccaactaccaaaaccgtggatctggaccgggcccttcatgcatacaagctccagagttcgaatctatacaaaaccagcctgcgcaccctgcccactggatatagacttccaggtgacactcctcacttcaaacacatcaaggacacccgttacatgagcagttatttcaagtacaaagaagcctatgaacacaccaaggcatatgggtatacacttggccccaaagatgttccatttgtccacgtccggagagtcaacaatgttaccagcgagagactgtatcgggaattgtaccacaaactgaaagacaagatccatacaactcccgatacccctgagatccgccaagtcaagaagacacaagaggctgtcagtgagttgatctacaaatcagacttcttcaagatgcagggccacatgatctctctgccatacacaccccaagtgatccattgccgctatgtgggagacatcaccagtgatattaaatacaaagaggacttgcaggtcctgaagggatttggctgcttcctgtatgacactcctgacatggtccgctcccggcacctgcggaagctctggtctaattacctatacactgataaggcaaggaagatgcgagacaaatacaaagtggtgcttgacactccagaatacagaaaagtgcaagaactgaagacacatctgagtgagctggtctacagagctgcaggcaagaagcagaagtcaatctttacttcagttcctgatactcctgatcttttaagagccaagcgagggcagaagcttcagagtcagtatctgtatgttgaacttgccaccaaagagagaccccatcatcacgctggaaaccagaccacagccttgaagcatgctaaagacgtgaaggacatggtcagtgagaaaaagtacaagattcaatatgaaaagatgaaagacaagtacactccggttccagatacgccaatcctcatcagagccaagagggcttactggaatgccagtgatctacgctacaaagaaacatttcaaaagaccaaagggaaataccacacggtgaaagatgccctagacattgtctatcatcgcaaagtcacagatgacatcagtaaaataaaatacaaggagaactacatgagccagttgggtatctggaggtccattcctgatcgtccagagcatttccaccaccgagcagtcactgacacagtcagtgatgtaaaatataaagaagacttgacttggcttaaaggcattggttgctatgcctatgatacccctgatttcactctggctgaaaagaacaagactctctacagcaagtataagtataaagaagtatttgaaaggacaaagtcagatttcaagtatgttgccgactctccgatcaataggcatttcaagtatgcaactcaattgatgaatgagaaaaaatacagagctgattatgagcagcggaaagataaataccacctggtagtcgatgagcctagacatctgctggctaagaccgcaggcgaccagatcagtcagatcaaatacaggaaaaactatgaaaaatcaaaggacaaatttacctcaattgtggatactccagaacacctgcgtactacaaaagtcaacaaacaaatcagcgatatcctttataaattggaatacaacaaggccaaacccagaggctacaccacaatccacgacacacccatgttgctgcatgtccgcaaggttaaagatgaagtcagtgatctgaaatacaaagaagtataccaaagaaataaatccaactgcaccattgagccagatgctgttcatatcaaagcagccaaggacgcctacaaagtcaacaccaatctggactataagaaacagtacgaagccaacaaagcccactggaagtggactcctgaccgaccggacttcctccaggctgccaagtcatccctgcagcaaagcgattttgaatataagctggaccgggagttcctcaagggttgcaagctttctgtcactgatgacaaaaacacggtgctcgccctcaggaatactttaatagaaagtgatctgaaatacaaagagaaacatgtcaaggaaagaggaacctgccatgccgtacctgacacgcctcagatcctgctggcgaagactgtcagcaacctggtgtctgagaacaagtacaaggaccatgtcaagaagcacttggcacagggctcatacacaacactaccagagacccgggacactgttcacgtcaaggaagtgaccaagcatgtcagtgatacaaattacaaaaagaagtttgtcaaggagaaaggaaaatccaactactccatcatgctggagccaccagaggtgaaacatgctatggaagtggccaagaagcaaagtgatgtcgcttacagaaaagatgccaaagagaacctgcattacaccacagtggctgatcgaccagacatcaagaaggccacacaggcagccaaacaggccagtgaggtggagtacagagccaagcaccgcaaggaaggcagccatggcttaagcatgctcggtcgcccagacatagaaatggccaagaaggcagccaagctgagcagccaggttaaataccgagaaaatttcgataaagaaaagggcaagacaccaaaatacaatccaaaagacagccagctctacaaagtcatgaaagatgctaataatcttgcaagtgaggttaaatacaaggctgacctgaagaaacttcacaaacccgtgactgacatgaaggagtctctgatcatgaatcatgtcctgaatacaagccaacttgccagttcttaccagtacaagaagaagtatgagaagagtaaaggccactaccacaccatacccgataatctggagcagcttcacctaaaagaggccacagaattacagagtatagtgaaatacaaagaaaagtatgaaaaggaacgaggaaaacccatgctggactttgaaacaccaacgtacatcactgccaaagagtctcagcagatgcagagtgggaaagaatataggaaagattatgaagagtccattaaaggcagaaacctgactggcctggaggtcacgccagctttgttacatgtcaaatatgcaactaaaatagcaagcgagaaagagtacaggaaagatctagaggaaagcatccgtgggaagggcctcactgaaatggaagatacacctgacatgctaagagcaaagaatgccactcaaatcctcaatgagaaagaatataagcgagacctggaactggaagtcaaaggaagaggcctgaatgccatggccaatgaaactccggattttatgagggccaggaatgctactgatattgccagtcagattaagtataagcaatcagcagaaatggagaaagccaatttcacttctgtggttgatactccagagatcattcatgcccaacaagtcaagaatctttcaagccagaaaaagtacaaggaagatgctgagaagtccatgtcgtattatgagactgttttggacaccccagagatacagagagtccgggagaaccaaaagaacttcagccttctccaataccagtgtgaccttaaaaacagtaaaggaaaaattacagttgttcaagacacgccagaaatactgcgtgtaaaagaaaatcagaagaatttcagctcggttttatataaagaggatgtctcaccaggaacggctatcggaaagacacctgagatgatgagagtgaaacaaacacaggaccacattagctcggtgaagtataaggaagcaataggacaaggaactccaatccctgacctgcctgaagtgaaacgtgtgaaggagacgcagaagcacattagctcggttatgtacaaagaaaacttgggaacaggcattccaaccactgtgactccagagattgagagagtcaaacgcaatcaagagaactttagctcggttttgtacaaagaaaatttggggaaaggaatcccaacacctatcactccagagatggagagagtcaaacgcaatcaagagaactttagctcgatattgtacaaagagaacttgagcaaggggactcccctacctgtcactcctgagatggagcgagtcaaactcaatcaagaaaactttagctcggtgttgtataaagaaaacgttggaaaagggattccaatccccatcactccagagatggagagagtcaaacacaatcaagaaaactttagttcggtgctatacaaagaaaacctggggacaggaattccaatccccatcactcctgagatgcagagagtcaaacacaatcaagaaaaccttagctcggtgttatacaaagaaaacatgggcaagggaacccctttacctgtcactcccgagatggaaagagtcaaacacaatcaagaaaatattagctcggtgttatacaaagaaaacatgggcaagggaacccctctacctgtcactcctgagatggagagagtcaaacacaatcaagaaaatattagctcggtgttatacaaagaaaacatgggcaagggaactcctttagctgtcactcccgagatggagcgagtcaaacacaatcaagaaaatattagctcggttttgtacaaagaaaatgtggggaaagccaccgcaacccctgtcactcctgagatgcagagagtcaaacgcaatcaagaaaacattagctcggtgttatacaaagagaacctggggaaagcaacccccacaccctttactcctgagatggaaagagtgaaacgcaatcaagaaaactttagctcggtattgtacaaagagaacatgagaaaagcaactccgacacctgttactccagagatggagagagctaagcgcaaccaagaaaacattagctcggttctttattctgatagtttccggaaacaaatacaaggcaaagctgcctatgtattggatacccccgagatgagacgggtgagggagacccaacggcacatctcaacggtgaaatatcatgaagactttgagaaacacaagggttgcttcacaccagtggtgacagatcctatcactgaacgagtaaagaagaacatgcaggacttcagtgacattaactaccgaggtattcagaggaaagtggtagaaatggaacaaaaacggaatgaccaagatcaggagactattacaggtttacgtgtctggcgtactaatcctggttcggtttttgactatgatccagcagaagacaacatccagtcccgaagcttacacatgattaatgtccaagctcagcgccggagccgggagcagtcacgatctgccagtgcactaagcatcagtgggggtgaggagaagtctgagcattcagaagcaccagaccaccacctttcgacttacagcgacgggggtgtctttgcagtctcaacagcttacaaacatgcaaaaaccacagagctcccacaacaacgatcatcttcagttgctacccaacagacaacggtatcttccatcccatctcatccatctactgctggaaaaatcttccgtgccatgtatgactatatggctgctgatgcagatgaggtgtccttcaaggatggagatgccatcataaatgttcaagcaattgatgaaggctggatgtatggcactgtgcagaggactggcaggaccggaatgctcccagccaactacgttgaagctatttaggcatttcaaagcatcacacttgtctgcaggacttacagatcctgcagtcaatgtttcggtttagactctccactgttacctaagttctcaagctgcctatggtttttctgtgtcaatgtgatttatggtagtaccatcctttctcctttgggttttaaaataagttgcagaacagacactttaaaagcttctgcaatattatttctgtgcctagagtctttctccattataaacatgttttaacattatttcttttctaaaacagggattttgaatatgccaaacacattaaaggaaaaatagcagagatgttcaccttttccttgctgattgctaatgcttattatttctaattcagttctgaagttataaacttataatcaatacaaaccagcaactaataaaacctctaattctgcaa

SEQ ID NO: 456 - DNA, 3313 bp, Artificial Sequence
  SCG3
gttccattcccgggggattggagtagcgttggagtcaccgacgccatcccctcccgcctctggcgtgcatggagcatgcgcttccttcctcacttcctctgcaggagggagcgagagtaaagctacgccctggcgcgcagtctccgcgtcacaggaacttcagcacccacagggcggacagcgctcccctctacctggagacttgactcccgcgcgccccaaccctgcttatcccttgaccgtcgagtgtcagagatcctgcagccgcccagtcccggcccctctcccgccccacacccaccctcctggctcttcctgtttttactcctccttttcattcataacaaaagctacagctccaggagcccagcgccgggctgtgacccaagccgagcgtggaagaatggggttcctcgggaccggcacttggattctggtgttagtgctcccgattcaagctttccccaaacctggaggaagccaagattgctgaagcagaagaagacaagattaaaaaaacatatcctccagaaaacaagccaggtcagagcaactattcttttgttgataacttgaacctgctaaaggcaataacagaaaaggaaaaaattgagaaagaaagacaatctataagaagctccccacttgataataagttgaatgtggaagatgttgattcaaccaagaatcgaaaactgatcgatgattatgactctactaagagtggattggatcataaatttcaagatgatccagatggtcttcatcaactagacgggactcctttaaccgctgaagacattgtccataaaatcgctgccaggatttatgaagaaaatgacagagccgtgtttgacaagattgtttctaaactacttaatctcggccttatcacagaaagccaagcacatacactggaagatgaagtagcagaggttttacaaaaattaatctcaaaggaagccaacaattatgaggaggatcccaataagcccacaagctggactgagaatcaggctggaaaaataccagagaaagtgactccaatggcagcaattcaagatggtcttgctaagggagaaaacgatgaaacagtatctaacacattaaccttgacaaatggcttggaaaggagaactaaaacctacagtgaagacaactttgaggaactccaatatttcccaaatttctatgcgctactgaaaagtattgattcagaaaaagaagcaaaagagaaagaaacactgattactatcatgaaaacactgattgactttgtgaagatgatggtgaaatatggaacaatatctccagaagaaggtgtttcctaccttgaaaacttggatgaaatgattgctcttcagaccaaaaacaagctagaaaaaaatgctactgacaatataagcaagcttttcccagcaccatcagagaagagtcatgaagaaacagacagtaccaaggaagaagcagctaagatggaaaaggaatatggaagcttgaaggattccacaaaagatgataactccaacccaggaggaaagacagatgaacccaaaggaaaaacagaagcctatttggaagccatcagaaaaaatattgaatggttgaagaaacatgacaaaaagggaaataaagaagattatgacctttcaaagatgagagacttcatcaataaacaagctgatgcttatgtggagaaaggcatccttgacaaggaagaagccgaggccatcaagcgcatttatagcagcctgtaaaaatggcaaaagatccaggagtctttcaactgtttcagaaaacataatatagcttaaaacacttctaattctgtgattaaaattttttgacccaagggttattagaaagtgctgaatttacagtagttaaccttttacaagtggttaaaacatagctttcttcccgtaaaaactatctgaaagtaaagttgtatgtaagctgagattttgtatacagaatccttatttcctcatagacttatattttataatcagaatatgttgctttgaaaaagcctctaatggactgaccttaaaactcatccttcttccactgtctcatccacataagcactccccgaagaattaagggggttctgttttcaaggcatgccaagtactaaagcaccttgcagagcgtgtctattacaagatgtcatttccaccagcagttcccttaggggagctgaaataaattcacattttctcaaagtctcatagctttggaggagccatctgcttttttggctgctctttttagctggctttttattaggctcagtgacataaaaaggatccaggtaaatgggtataggatttgctggatttactaacaatttccccctgttcttaacacttcctattagtgacttttcagacattgagtttacttataaagagagatatttatgtactctctaagaagacaaatgaggtcataaacactgcataaagcaaggcaaaaatgtatgccacatctcagttatctaaactagattagatccaagccaagttttctcaacagagagcaaagggccaggcagtaaggtagaaatagagataaaaatcattccttccttgtgatccaaagctggtcgagcagctttcctggaggaaaaggttaatgaacttcaggtccctgcaactcagcccccaccacaaacacagccctggaaacatacagtggcgcaaggtcctcttgaaatgttaatggttaatgttcccaaaccagagaatgctttgaaaatgtatcattcagtgtaaattaattacatacatatttttctatatatttgtttcaaactgtaaaaataacataatatgtaatttgtgtattagtgagaggtgaagccagctggacttcctgggtcgagtggggccttggagaacttttctgtcttacaagaggattgtaaaatgcacccatcagtgctctgtaaaacacaccaatcagcgctctgtagctagcaataggtttgtaaaatgcacccatcagcactctgtaaaacgcaccaatcagcactctgtaaaatgcaccaatcagcaggattctaaaagtagacaatcacagggaggattgaaaaaaagggcactctgatagggcaaaaacggaacatgggaggggacaaataagggaataaaatctggccaccccagccagcagcagcaacctgttcaggtcgcctgccgctgtggaagctttgtccttttgctcttcataataaaccttgctactgttcaaaaaaaaaaaaaaaaaaaaaaaaaaaaaaaaaaaaaaaaaaaaaaaaaaaaaaaaa

SEQ ID NO: 457 - DNA, 4244 bp, Artificial Sequence
  CALM1
cctcagccctggtgcgcgggggccgggggtggtgaccctcctggccgaggaggggcggcgtccagacgcccgctcgggggccgccttcccccccacgcctgcccccgggcacgcgccctgcccggtccctcgccccgcgccacttccagtccgcagagagatgccctccacgtttctgctttctctgcagcctctagattgccagatgcgactgtgcgcctcgctgggctgatcagctgaccgaagaacagattgctgaattcaaggaagccttctccctatttgataaagatggcgatggcaccatcacaacaaaggaacttggaactgtcatgaggtcactgggtcagaacccaacagaagctgaattgcaggatatgatcaatgaagtggatgctgatggtaatggcaccattgacttccccgaatttttgactatgatggctagaaaaatgaaagatacagatagtgaagaagaaatccgtgaggcattccgagtctttgacaaggatggcaatggttatatcagtgcagcagaactacgtcacgtcatgacaaacttaggagaaaaactaacagatgaagaagtagatgaaatgatcagagaagcagatattgatggagacggacaagtcaactatgaagaattcgtacagatgatgactgcaaaatgaagacctactttcaactcctttttcccccctctagaagaatcaaattgaatcttttacttacctcttgcaaaaaaaagaaaaaagaaaaaagttcatttattcattctgtttctatatagcaaaactgaatgtcaaaagtaccttctgtccacacacacaaaatctgcatgtattggttggtggtcctgtcccctaaagatcaagctacacatcagttttacaatataaatacttgtactaccttaatgataaggactccttaaagttccatttgctaatgattaatacactgtttgggctggccagtttttcatgcatgcagcttgacgattgagcacagtcaggcctttgtattaaaaatgaaaaatgaaaaaacaaattcaaaacctattcaaatgggttctagttcaatttgtttagtataaattgtcatagctggtttactgaaaacaaacacatttaaaattggtttacctcaggatgacgtgcagaaaaatgggtgaaggataaaccgttgagacgtggccccactggtaggatggtcctcttgtacttcgtgtgctccgacccatggtgacgatgacacaccctggtggcatgcccgtgtatgttggtttagcgttgtctgcattgttctagagtgaaacaggtgtcaggctgtcactgttcacacaaatttttaataagaaacatttaccaagggagcatctttggactctctgtttttaaaaccttctgaaccatgacttggagccggcagagtaggctgtggctgtggacttcagcacaaccatcaacattgctgttcaaagaaattacagtttacgtccattccaagttgtaaatgctagtctttttttttttttttccaataaaaagaccattaacttaaagtggtgttaaatgctttgtaaagctgagatctaaatggggacaaggcaggtggaggggaggccagtgtacatgtaaatgcccacagcccagcattgggtttccctcccaaggccccagcaccaacctctgagcccaagaccttgcctgaaaacaagcagataccgattgcttcatcctatttatggacatgtaggtctagttgcattttcactggggggaggggggaaggtgaattatggtaacttttaatgatctattcaggcagtagagctcttaaggaaaaaaaaaaacccactttctctcaagcatgtatttaggggttgttctcaattgtgctgctgattacctgtcttatgtaactacttgagaccatctgcaagagacatgatttagtgtgtctgtaattcaatcttcgctgtgtgtggtagaagcagtagtcacttttgtaagccagtctcttcatgcctaaaagacactaccagtcacctttgattcgcgacttttaatttatgattatacttagcctcctcctcctttttttttttttcccaagttgacttgactttgcttttttccccccaagtagaactaatgctagcttccagcttgaaagtaaaactccagtgtggagtgaattttgtgtctaattataaacctgtaaccaaaactcagacatctggtactggtctttgcattgagattggtccctgtaaaaccccctttaaaagcatattgcatttagtacagagctcttttttgaaatgaaggctggagatgtgcatttttcacggtgttaactggttgtatcttattagcaaggagattggggttttgagtgtttgcgtgggtggtttcaatttgccagggaacagtggcaggctgctagcaaggcagtgagaagctcttggcagccaaatgggtgcattcagggctgatttatagagacccttggcttctccttctcctactccctgtctttctggcattttgtagcttgttagattttctgccagaggggtgggtcagagcagtggaggggagacatcgcccatgtgcttctgctactggtccttgggctgggtggttggtagaggagatgttgacactatgagctaagggttggcttttgtaattacctgaatctgaaaggaatgcctaaggttaccttggggtttctcttctggtgagatagggttcctggtttgagtaagttaatgtcctggatatttcttgtggcagggggtggtcaaagagcctgattgctgacccagtctcaggcctgtggtcgatgacctctcggtagtttcaaagggggctggagggggatatttgacttgttttttcgaaatgtagccttctaaccctcaagtctttagaagctgggtggactcttagtggtcctgcagcgtatcctaaaagactacctttgaaacaggattcttgtatggccaggatcctgtctgggaaccagaaaccctacaccctccccctccagggaatgctgagttccagttttgagcagaggtgaggcagaatccactgtagccttccgccctggtatttggggggatgaccagcccaggcgttgggtgttagtctgcatgagtttgtgagaggaaatagctgggtgtcctggcagtgcccttgaagttggttaggaccttcctgtaaactcttgcccctacttctaactactctataaatatatacatatatttatatataaagtgattagttgaactggcatcctgctttagcctgagacttgccataagaaactgctgagtacttggcaaaccctttcatagttttgttctccatctgtttggggtaggtgttgagcgaggcaaatggatctcgatatttcagatgggcttttgatgcactgttgccaaggaaggctttttctgattttttgacaaatgaatttttgcacactttcattggtgtctttcggcaacttacacacattgaaaatgagctattgtacatatttttatattctctttataaatgcatgtctgattgtacttgtaacaatattgtaatgaacggctgtgcagtaggcccagcgctgctgtgtctcgtcagaggaatagcttaccacgaacccctcagcatactgggaatctcttcctgaacaacgaatgtaaatttggtcaagtctactcttccgttcattcaattattttaagcatttgaattatttattgtatatcctaaatatatttctcctttggcagtgactagatttccactaatgtgtcttaatctatccctccagctggcagttactgtttttttaatcccctgaagttgtcctgtaggagacagaaattctttgctgtctgtatcccttggagtaagaaggtagtggcatgggtggagtgtgtgttctttctccaaatctattatgatgtttattaaacacttctgtagcaaagatggtggtagttcttttgttactgaagttgcccttcaccatggctatttgaaaaggagatgtacttggacgtttctgtaaatcttgagataaactgtttggagatttaaccacctctctgatgggggaccaactctatggaaattgtaaatacgttttatttataaacctggcactgtattcaataaacatttctgcagcctttcatctctaactgcgaaaaaaaaaaaaaa

SEQ ID NO: 458 - DNA, 9580 bp, Artificial Sequence
  CADM2
gtgcttcgtagagctgccgccgtcgccgctgccgctgccgccacagccgccgctgcagccggagcatccgggagccgccactgccgccgccgctgccgctgctaccgccactagcgctgcttccactgcttctacctcccctcccaggaccccgagacaccccgggcgcgagcggcagtgctgcttgcttgctcctcctctcccccagcccttcccctccgtgacctacccactccttgcagccctcgcccgcaccttctccaacaccccggcatccctgcaccacctgctcgggcagccccggcgggctctgggacttgctgtgcgcgccgagaggaaggcaagctccaaacccctgcctggaagacgggctgtcgcggctgcaccaccagcaggaggaggaggagaagaaactatttcgcgataccccattctgcgggtgctttgccgctgccgcttctgctgccgccgatccgagtccgcgggttcgaacaccgcagcggtggggacggtgggtccggcgggcgccgggaggaggacaccagcggagccctgcactctcgtgccccgctcaccagcatctacttgccccctcgttccttccccagccctttagagaagggaccatgatttggaaacgcagcgccgttctccgcttctacagtgtctgcgggctcctgctacaaggcagccaagggcagtttccactaacacagaatgtaaccgttgttgaaggtggaactgcaattttgacctgcagggttgatcaaaatgataacacctccctccagtggtcaaatccagctcaacagactctgtactttgacgacaagaaagctttaagggacaataggatcgagctggttcgcgcttcctggcatgaattgagtattagtgtcagtgatgtgtctctctctgatgaaggacagtacacctgttctttatttacaatgcctgtcaaaacttccaaggcatatctcaccgttctgggtgttcctgaaaagcctcagattagtggattctcatcaccagttatggagggtgacttgatgcagctgacttgcaaaacatctggtagtaaacctgcagctgatataagatggttcaaaaatgacaaagagattaaagatgtaaaatatttaaaagaagaggatgcaaatcgcaagacattcactgtcagcagcacactggacttccgagtggaccggagtgatgatggagtggcggtcatctgcagagtagatcacgaatccctcaatgccacccctcaggtagccatgcaggtgctagaaatacactatacaccatcagttaagattataccatcgactccttttccacaagaaggacagcctttaattttgacttgtgaatccaaaggaaaaccactgccagaacctgttttgtggacaaaggatggcggagaattaccagatcctgaccgaatggttgtgagtggtagggagctaaacattcttttcctgaacaaaacggataatggtacatatcgatgtgaagccacaaacaccattggccaaagcagtgcggaatatgttctcattgtgcatgatgttcccaacactttgcttcccactactatcatcccctcccttaccactgcaacagtcacaaccactgtagccataacaaccagcccaaccacatctgcaacaaccagcagcatcagagatcctaatgctttggctggccagaatggccctgaccatgctctcataggaggaatagtggctgtagttgtatttgtcacgctgtgttctatctttctgcttggtcgatatctggcaaggcataaaggaacgtatttaacaaatgaagctaaaggagctgaagatgcaccagatgctgatacagccattatcaatgctgaaggcagccaagtcaatgctgaagagaaaaaagagtatttcatttaagatgcaggccaagattctgagttttactaccaggctgaatgctggagaaaactggctatcatctttcagaagtcatttctaccatcgtctgctacccttattaactcccatactgtactgctatcagtagccagtgtataccaacaatcagctgttgaaagcatcattctttaattactgtaccatccataatgcaggacatttcttactgcctaaatttcacaccattgctcttttaacatacagtgcttgaatatacagccttaacaatgttaatcatctccttggatcattatattgagtggtttttatacattaaaaaatgtatgcagagtttttttcccccattttttcccctttaagtcatagaccttatcagtttgccattggacagctttcacaagtaacaggattagggaaggacataatgtatttaagaataagtgaaggttagaggtttacaattaatgttttctacatgtctgtcttcaaagacaacatgctttggaaacatatgtcctagaaaacataaaattaaaaaaaaacactatagtgtagtttttggaatgttggagattatactggtaaagctgtatcgatttgctattgaaatatagtatttgatacaggagccatgtgtacgaattgcaatcatgacatggtattttctataattatagagatcttactattaggatattgtagcttcatttaccaataaattattccaaatgatttactgcttttggaatcacaaatatttaattcatttctctaatttgattctataatttatttgcttcataaagattcacctgcctaaacaatattgaagtatccatagggcacaattttcagacattttagtatctgtatatagtgcatataataaatccaattaaacattatttgatacatatttaacttttttggctgtatgtaattcagtcataagtaagcattttctaacgtccattatatccctttaggtattacttaaaccaatattataagtagataacatgtattagtatttttgtctgtatgtcctagcactgttcaacaacaaatttttctagttcttgttaatttttatttgttatacaatggaagcacaatgttataaggaaaggtaattttaagctaacaaccagtgcacagcctcaggttttaaattacaaccacagttgaataataacctaaaaataaattttagtttgctaaaaatttacaaattttcattttgcagttccagagctgcttacctatgttggtttgccaaaaagaagtgtttaagatatgttttctgtataaatgaactaattctttatattaaattcctgtctatgcattttgtgaggtacaaactgatgaaacagtgagtgatagagaatttctgccatgcttttaactccaaagtgaaagtctctttctctggattattttaaaattttggcgtgtttaaccattaagaaatgctgtattcttaaatatgaaacagttaatctaaagtcttattatttcttctagtaaaataaaatattgttagattagttctcattaaatttattatatgctaaagaataaaactccagttagatttaaaaaaatcccatttacaagcattgcacctttaagaagaaaacaaatatgacagtatggtagctatacttgtgatgtctgacgcatgatggcctatggttttaaaaatagtattgtggaatatatttttgggtaataagaatggttgagtgcaacatcatgtattaatatcaaatgaaagacaagggtgctgtatctttgattatttatcaaaaaagtataaatcttttaaggaaaatgttagaattttaaagtttttttttgattgttgaagcatttatcttgttgatttcttacaaaagaaaaaggacgatgtcagtcaagcagcactttttcagaatatacagaacataaataatatgatgtggttgagtgttaacataataaatcatatacagtatgacattttaaggaaataagtctgcattgatgtgattgcatgcttgtttttacagttcactccataccatctgtggaaaaatgcaataatatgttaatatagtatggtagtttgagagaatcaggtaggtgctactagacacattgaaactagaataggtttataaactgttcatatctttcaatgcataatctttagaaagactccacaaagcaaaattcatcctgttagtacaaaatggaaaggttcttattacagaagtaagttgtacaaactgcatcatcaattactatgtaaagcctaatttcaggatgcacttacaaaattgctactcttcatcgatgccgtatttacatccctcttcatttcatctatattctacttggctccaacaactaaattgttgcctaaataactcaatcattatttatagcactgtaaaattagaaatccaaaattggttgcatttcatgatttttgactcttttaacccttcagagtaatataaaatctcattagaactcttataaaaccagttagctaaaacaactagattattatactagttataaatgctggtatattataatttgtgggatctaattaaatgtttgcctattaaatatagtttgatttaaatgagacaccatgttctgaactggagaaaacaatatcaatgaagtcatattttcatacctttaaaaattatttaattttcaaccaaacaaaaaataaattgtaaaaattatgctcatttctattccaacaagtcagaaaataatgacataatatttctaaatgagaatgatgtcaatttcattgtctggaacatgcacacttgtgtgcacatagagtcaatttctgtctcttctaagtgagcacagtaggtagggaactcaatggaagcagtgtgcacacacacacacccttagtagaatatggagcattattctttaccaaaagtagctattctctgccagtgtactgtttacagtgtaaattgattgtcctccgtcaaaatcaagtctaagcggcattttacttttcttttcttttttattttccatttttgggtgttctagataggattattatcaaaagtaggaggaaaaagaaatgtttgtgagtgcaagattaaagacagagcgcatgagcagagtactgatggtgtgcgtgtttgtgtgtgtgtatatgtgtgtgtataagagagaaagagaaatcgaaaagagagagaaatttcaacttgttttcttttaccagagaatccaagaagcagtttaaggaacctgatattggagtttaatctagaaactggatgatctcatattgattcatgatgcttaatctttcattgaaactccacaattaaaataacaaatagagaaagaaaactaactttcctaaatatggcaaagaaactaacacctcatttatttttatttctttgtaaaaatataaatatctcaatcaaaagtacaggctcatttgtaattatgtactcatgattgtaacagcattgagatttcatataggcacatgtatagcagctgtttgacagtgatggctcttccatgtaacatagcagttatcgtgtaatttagtgccacttattgcaaagtgttaccaaggggaacatttcaaatgccttttgtttttctttggacatcaaggtaatttagtggacaacaaatattaaattttacattatgctttttaattgtggagaaaatgcaaaacctcatgtcttaccacaactttcccatggtattgctaattacttagagtctctaaaattgcccaatattatttccctttgcaaatggtaatttctgataaaacaatacaaaacaaaaaaaaagcagtaatcacagccaaataaatgaaacacctaatgagaattactgttgagtaatgctttttattaagtggcacaaagtacacactaaaaactatgcaaaatataggtaactacagtgtacgtacatgtaagtatcttgtacttgctgtgtatggatgttggaaacccatgtaattataatatgcattttgaatattgggaaagaggaaatcttagtgtagataatagaatttgttttgaaatatacactggcaatattgaaatatactcagtgcaatatctgcagttctattgctggatacttaatgcaaagggattttaaagaattcttcagcaagatccaagaggttgctaatcttcacctctcacatactaaagcattcattaaaaatacaactaattcaaggacaagttaagtttttcttattaatgtgacacagtaacatttttatttggattagtttttggtgttattgcagagaaagaaataacctgagttttaaatttcgattcatatctcattgaattgggaattcttcaattttgtttgaaatgtgtgcatgttttcatagattgtagcaagtacaaatgtattcaatgaaagaacatagggtagttttaatagttaaagtcactatatcttaatgggaattttaaaatatcttttctttttctattcattttttccctttctctctctattctacccccaaacaagccctttgcactcatacccttccaaaggcaatggattgaaagtagcaagataataaagagagttaaaggggacaacatataacaatgggttctaaaatcatcagcatttttatgtattgagattattaatattgaatgcaatagttattggatatagctggtaagttctctgccatgcatacttacaataatccttctacctctcacttttaacatgggctatgatacttcaatataaatagaggaaataattatttaccagatatcccaggaagcattcttatggaactattataacagtgcactccccaccccctgggaaatctcaaaagccaagttcttcagtgtattctatggtgtatgaatctgcatttgtttttccttttctatcattagcttttcctaaaggcaaaatattataactttataagaatagtccttctcctgcctatttaatatttcaatgttaatataattgtattggtttttaaaaataattaaaatggcaacactttgcgatccaatctgatatttaatttttaaaatgtaacaatttcttataaattcatgctgtgttttaagtaaaaatcatgtatatgaattattttaccaagtagtattatctgcacgagacaaatttaagtattttaaaaatcatccttattaataaataatcctcatataatgcacagtattgccacaaatgcccacttcattttgtctgcatagacatattaagaatttttcaatgatgtaatttaattatcctaaaagaaatgacagattcttctgtaggaaaaaataaaaacatgaatatctcaaattataatggttaatctctaaaatatgcttaaagtaagatgtttctatgttatgtggttatgttatcaataatatttggttgatcttcacatattttatatgcatatatatatcaagaagttatatatatataactcaagaaactcaagttatatatatatgtcaagaaatgtatgattattttggagagaatgggcccaaatgtgaaaaagatataaaaaaaacaaaaaaaacaaaaaaaaaacactattttcccctacgaaatatactgtatatttcaaaagaagaaaagttaaaagatatttgaagattgcaggggcaaaacaaaaacctaccagggctcagcacttaagcacttttcccacatccagggtcaaagcagcagtaactacatggacttttaagtgcggtatgaaatgcaacattacgcttacaaacagtactgtcaaacctcaaatgctttctttcttcagatgctttttcgtgtacatgatactagtagacacttttctctttatatttactgatagtgaaaatcatacgcaataaaatattgatgtttgaaggcagtggtcaccaattggttaaaaaactatgaaatgtaaactgaattgttatatctctatcctttttgcttttctctgtgtttttaatgtatggaataaatctcataaatagaaagaaaaataatctagaaatttttcaaagctagtactctttctccttataaatgtacacaattttaatctttttacaaatttatttaactgtacctactgtacttattgtagattcaatgacgcagttaagtcatcacccaaggatttatgaatttgagattactgacctgttttcttcatattgcattcacatcaatatttgtgaatttgttgttcagcttttcattcaaacaaaaaatattccctcaagaaagctccatttttatcataaacatttcaacataaccaacattagaacaagtctgccatgttaaaaataatttaaagacttatctctgaaaacggtatccagaaacgcaggtgttcccagtaatgtagcttcaaaaataaaatgtgctatttatatgacatgaaattcataacttttggaagggtatatttatgacagcataaaaaataaattctgtgctataaagaagatccaacaaattaaccatataagcacagaaaatagagaaacacagttattgaatctactcttgtcattaacattttcaaaaaacaaaatgcatattgtaatatttggtacatgacacttgcatgttgatatgcctatatacttacaaagtattcaatgtgtacttagcggcgcttaaaatatgtcatgtacaactcttataaacatttttacagggttcccatttgcacttcatctttcagtaaagtcttgtcagaaaaaaattgtctgataaatatggaaaaataaaatttgaattttagttatctgttggacattactgaattgtctattcatttagtacattttcttaaccttgaaaacagacattgaaagatggaactttcttttttccagtgacaggtcattaaatcgatggtacaaaacatacttctttatgccaaacacattattttgaatacctttttttcaacttcatacattatccatccattttagttttcctcgatgatgcccattttctttgtaaatttctaagtggaagttttaaaaattaagcatcagtaaaataaatgttatcttatttgtacaacatttaatcgttattccttggaatatatgaaccttgtaaagtgatgactaagggtcaaaaaaaatgttgctgacttagggaaatttgcttgagaatgccaaaattttaaaactctgtaaaggtaattttacattcacttatgtgtgtttactaatgttgagtaggaacagaagcaaaaatacctaaacctattttttttaaccttcacactctaaccagtattatatatttcagctacctaagataatgcaattaatcatatatccaacctaagcttctgccaataaggatttcagataagcttttaaatttatggaggattttctttgtgtctttggaagttcacttaccataaagtattttatagtctactttaaataacagattttgttacacagggtaagccaaaggctgtacaagatttagtgtcattgggtctcatatttgtgttagaccatgaaatattccattaaaatttatctgtaaatacaaggcaa

SEQ ID NO: 459 - DNA, 958 bp, Artificial Sequence
  ATRAID
gcaccaagggaacggaaaatggcgcctcacgacccgggtagtcttacgaccctggtgccctgggctgccgccctgctcctcgctctgggcgtggaaagggctctggcgctacccgagatatgcacccaatgtccagggagcgtgcaaaatttgtcaaaagtggccttttattgtaaaacgacacgagagctaatgctgcatgcccgttgctgcctgaatcagaagggcaccatcttggggctggatctccagaactgttctctggaggaccctggtccaaactttcatcaggcacataccactgtcatcatagacctgcaagcaaaccccctcaaaggtgacttggccaacaccttccgtggctttactcagctccagactctgatactgccacaacatgtcaactgtcctggaggaattaatgcctggaatactatcacctcttatatagacaaccaaatctgtcaagggcaaaagaacctttgcaataacactggggacccagaaatgtgtcctgagaatggatcttgtgtacctgatggtccaggtcttttgcagtgtgtttgtgctgatggtttccatggatacaagtgtatgcgccagggctcgttctcactgcttatgttcttcgggattctgggagccaccactctatccgtctccattctgctttgggcgacccagcgccgaaaagccaagacttcatgaactacataggtcttaccattgacctaagatcaatctgaactatcttagcccagtcagggagctctgcttcctagaaaggcatctttcgccagtggattcgcctcaaggttgaggccgccattggaagatgaaaaattgcactcccttggtgtagacaaataccagttcccattggtgttgttgcctataataaacacttttttctttttttttcctctctttctttttaaaaaaaaaaaaaaaaaaaaaa

SEQ ID NO: 460 - DNA, 1379 bp, Artificial Sequence
  FAM122C
ggcgggacccaactgattgtcaaaggcggcagattgtagtttttgttttggccggaaaggcttaccatgagttgccagggctgagagagatggagaaggattcgcggcggtgacagattaaattccccagttacattatagacttggaggtgggggatcttctcatcgttagaggccccgatcatgggagataggcggttcggagccagttctgcctaactttgtgttcactgatgttagggctgctagggctgcaaaggtgggcacccctactcgcctaagagctttctcctctcttctctttttcccctttgcctctctccttacatcacctgcccactaagtagacttgtccttgtgtggacgggagccggaaagccttgagaacttattcctcgacccggacatggcacaggagaaaatgaaactaggtttcaagtcgctgccgagttccactaccgcagacggcaacattctgagaagagtcaacagtgcccctttgatcaatggacttggttttaattcacaggtgttgcaagctgacatgttaagaattaggacaaacagaacaacatttaggaatcgacgctctctgttgttgccacctcctccctttcatggttccatcagccgccttcatcaaatcaaacaggaagaagccatggatttaataaatagagaaacaatgtctgaatggaagctacaaagtgagatacagataagtcactcttgggaagaaggcttgaaactggtgaaatggcatttcaatatcaaccaaaaaagattttccaaggcacaaccaacatgctttcttctgatacttcccaactgtcagaaaataatgtgtatctacttccagctacttttgatggaaacgacagcaatgctggatcttctggtaattcgtcagctgaaatcggcactgtcacaaactctcctgtgtcaccttctgatactggttctcatttgttctagtagacaaactttcaactaaatgattcacccatcccaagactttctcaccagtggagaaacacacacatcaagcaaaccaagtcagagcaatgagaattgtactgtataatttaaactatctcctatttatcttttttcctcaatttcctaaaattctatttatctacagaacttgcgtgtataattcttgtgtacatccttaaatttaatgtaataacatgttaaagatgttttccaaatcagaaccatgttgaagatacaagcgtaaattgttaggctgctattttctagaaaatgctgtaccttgactttttaaaataatcttatgaaacataattctgataaaatataattgttcaattaacaaagtaaaatgatgtttgacaattatgtaaaaaaaaaaa

SEQ ID NO: 461 - DNA, 3226 bp, Artificial Sequence
  SIGLEC10
gcccccaggagacccagaggacaactgggcaaggtgggccggagagtgtgggggaaggcaaaggagttctgtgagctcagcgtctgaagctcatttcatgcatcaggccccagggctcagcttccgccttcggcttccccttctgccaagagccctgagccactcacagcacgaccagagaacaggcctgtctcaggcaggccctgcgcctcctatgcggagatgctactgccactgctgctgtcctcgctgctgggcgggtcccaggctatggatgggagattctggatacgagtgcaggagtcagtgatggtgccggagggcctgtgcatctctgtgccctgctctttctcctacccccgacaagactggacagggtctaccccagcttatggctactggttcaaagcagtgactgagacaaccaagggtgctcctgtggccacaaaccaccagagtcgagaggtggaaatgagcacccggggccgattccagctcactggggatcccgccaaggggaactgctccttggtgatcagagacgcgcagatgcaggatgagtcacagtacttctttcgggtggagagaggaagctatgtgagatataatttcatgaacgatgggttctttctaaaagtaacagtgctcagcttcacgcccagaccccaggaccacaacaccgacctcacctgccatgtggacttctccagaaagggtgtgagcgcacagaggaccgtccgactccgtgtggcctatgcccccagagaccttgttatcagcatttcacgtgacaacacgccagccctggagccccagccccagggaaatgtcccatacctggaagcccaaaaaggccagttcctgcggctcctctgtgctgctgacagccagccccctgccacactgagctgggtcctgcagaacagagtcctctcctcgtcccatccctggggccctagacccctggggctggagctgcccggggtgaaggctggggattcagggcgctacacctgccgagcggagaacaggcttggctcccagcagcgagccctggacctctctgtgcagtatcctccagagaacctgagagtgatggtttcccaagcaaacaggacagtcctggaaaaccttgggaacggcacgtctctcccagtactggagggccaaagcctgtgcctggtctgtgtcacacacagcagccccccagccaggctgagctggacccagaggggacaggttctgagcccctcccagccctcagaccccggggtcctggagctgcctcgggttcaagtggagcacgaaggagagttcacctgccacgctcggcacccactgggctcccagcacgtctctctcagcctctccgtgcactactccccgaagctgctgggcccctcctgctcctgggaggctgagggtctgcactgcagctgctcctcccaggccagcccggccccctctctgcgctggtggcttggggaggagctgctggaggggaacagcagccaggactccttcgaggtcacccccagctcagccgggccctgggccaacagctccctgagcctccatggagggctcagctccggcctcaggctccgctgtgaggcctggaacgtccatggggcccagagtggatccatcctgcagctgccagataagaagggactcatctcaacggcattctccaacggagcgtttctgggaatcggcatcacggctcttcttttcctctgcctggccctgatcatcatgaagattctaccgaagagacggactcagacagaaaccccgaggcccaggttctcccggcacagcacgatcctggattacatcaatgtggtcccgacggctggccccctggctcagaagcggaatcagaaagccacaccaaacagtcctcggacccctcttccaccaggtgctccctccccagaatcaaagaagaaccagaaaaagcagtatcagttgcccagtttcccagaacccaaatcatccactcaagccccagaatcccaggagagccaagaggagctccattatgccacgctcaacttcccaggcgtcagacccaggcctgaggcccggatgcccaagggcacccaggcggattatgcagaagtcaagttccaatgagggtctcttaggctttaggactgggacttcggctagggaggaaggtagagtaagaggttgaagataacagagtgcaaagtttccttctctccctctctctctctctttctctctctctctctctttctctctcttttaaaaaaacatctggccagggcacagtggctcacgcctgtaatcccagcactttgggaggttgaggtgggcagatcgcctgaggtcgggagttcgagaccagcctggccaacttggtgaaaccccgtctctactaaaaatacaaaaattagctgggcatggtggcaggcgcctgtaatcctacctacttgggaagctgaggcaggagaatcacttgaacctgggagacggaggttgcagtgagccaagatcacaccattgcacgccagcctgggcaacaaagcgagactccatctcaaaaaaaaaatcctccaaatgggttgggtgtctgtaatcccagcactttgggaggctaaggtgggtggattgcttgagcccaggagttcgagaccagcctgggcaacatggtgaaaccccatctctacaaaaaatacaaaacatagctgggcttggtggtgtgtgcctgtagtcccagctgtcagacatttaaaccagagcaactccatctggaataggagctgaataaaatgaggctgagacctactgggctgcattctcagacagtggaggcattctaagtcacaggatgagacaggaggtccgtacaagatacaggtcataaagactttgctgataaaacagattgcagtaaagaagccaaccaaatcccaccaaaaccaagttggccacgagagtgacctctggtcgtcctcactgctacactcctgacagcaccatgacagtttacaaatgccatggcaacatcaggaagttacccgatatgtcccaaaagggggaggaatgaataatccaccccttgtttagcaaataagcaagaaataaccataaaagtgggcaaccagcagctctaggcgctgctcttgtctatggagtagccattcttttgttcctttactttcttaataaacttgctttcaccttaaaaaaa

SEQ ID NO: 462 - DNA, 3756 bp, Artificial Sequence
  ELAVL2
aacggcgggaccgcggcgcctgggcgtcactgaggcagtagccggccgggtgaggagggcggttgccggcgcggcgcggcgcggcgcgggtggggcgggggttccgccggcttccagtcccctttcccgccgccgccgccgccaccgcctctccgcggagctcgccccgagcgactcctccgcggcagtgctgacggccagcggcacgagccgtagtagctgcagcttcgagtcacagcagcaggtaattgctgccatggaaacacaactgtctaatgggccaacttgcaataacacagccaatggtccaaccaccataaacaacaactgttcgtcaccagttgactctgggaacacagaagacagcaagaccaacttaatagtcaactaccttcctcagaacatgacacaggaggaactaaagagtctctttgggagcattggtgaaatagagtcctgtaagcttgtaagagacaaaataacagggcagagcttgggatatggctttgtgaactacattgaccccaaggatgcagagaaagctatcaacaccctgaatggattgagacttcaaaccaaaacaataaaagtttcctatgctcgcccaagttcagcttctatcagagatgcaaatttatatgtcagcggacttccaaaaacaatgacccagaaggagttggaacagcttttttcacaatatggacgcattattacttctcgtattcttgtcgaccaggtcactggcatatcaaggggtgtagggtttattcgatttgacaagcgaattgaggcagaagaagctatcaaaggcctaaatggccagaaacctcccggtgccacggagccaatcactgtaaagtttgctaataacccaagccaaaaaaccaatcaggccatcctttcccagctgtaccagtctccaaacagaaggtatccaggaccgctagctcagcaggcacagcgttttaggttttctccaatgaccattgacggaatgaccagtttggctggaattaatatccctgggcaccctggaacagggtggtgtatatttgtgtacaacctggctcctgacgcagatgagagtatcctgtggcaaatgtttgggccttttggagctgtcaccaatgtgaaggtcatccgtgactttaacaccaataaatgcaaaggttttggatttgtgactatgacaaactatgatgaggctgccatggcgatagctagcctcaatggataccgtctgggagacagagtactgcaggtctcctttaagacaaacaaaacgcacaaagcctaatgagctcttgtcctcagtccatttatatatgaaaactatacaacaaaggcaagttaagagaaactttatacattagtaaatgtctttgtaagtcagtgttgagatggggataaaatgactacttagcatcctaagaaatatgtgagattttttattgctagtatttgaattaaaacttcttaaatatcttttatgtttgaatatggacaagaggtacagggtttttacctgtcacattgcattctattgccttctttgaagaaggtggaccttttaaagtgtttcagctaagggaagacatttcttttctttttacataactgccttgaacctgtgagtaaatattgaggctttgtgttgtaattcttcagttggttgtgtcttttttttcccccctttttttcctttttctgattagctttgtgtttggtttacatttaaagcattgctgttatgtctgtttaagaaaagtattttgaagtttacatttttatttatgaagtttaaaacagtatttattttgtaattatgatttgggttggggaagggggggctacattataaacgcttattgtaagaatactggagaacttttcgtaaagcagtaccttgccaaagagataagagcctctttgatgtgggtttaaaaaaagcatctatttttataaaaaagaaaatttggagaaactttttactggtcctggaacaaatattttgacttgaatactttgagaaatctcttcatatgacacctagtgagcttttaaaatttaccaggaaatttgcagcggttggaaaatttagaaagatttatggtgtagaaaatacttttgagatctttgtatgaaaggagtagaatcaatggggggaaacactgctggtttcatttttgtaatcaccagtggagcgtctgatcatcctggttattatgtgataggtggctcacattgatttgtgattttgaaacaaataaaaaaaatttacaaaagaatatataagagcaggcaagaaatttaaattaccgagagatgggggaaaaaatctgttcttcctaaagaaatcccttcagatagagctcatggtgtttagtgatgtacttgcagtattgtttgaagaattgttttgtcttaaggaaaaaagacgttgcacatgatttgtactgcagcaaatcagcaaaagtgatctgagttggatatatttgaaggtattttgaaagttacgttcaaggctaacacctgagctttgtgtaatgtaaataagaccttgtgtttatgaacctttcagctaatttaattttttttcccttacatgccaagtgatgttcaggttttgaatgtttttgtatcagttttttcctttgtaaatggcattaacattgttacttgaggtcttgcttaatcacttttgttgtcctgaggacttgaatttacagtgcatcagatttgttgcaaattttgtctgtagatagtctagcttcagctgtttatggtgatgctacattttcgtttataaatatgtttgtggtataaaaaaatgagtataaccataggttttgaacaaatttccttacatttttcatacaaaaatcataaatatctgtatgctattgaaatttaactttgtatgatgcttaaaaaccactatttggggaaataataaaataagtctttaccatgtatgaaagaaattttaaaaaatacaaaatattttctgattagcatctagcttataataaattttcaaaaaagctgaaggcaaaaatgccttcatcaggatgcactgagaactatatagttacgtcctgctttttgtataaactgagatgctcacatgcttccccttagaacaggcaatgtgctatgcataacatagttgtacattatctttgcggttgctttgagttttattttttattatttaaaattgtagttataaaatttttcagtatagtacagtacatatactgtgaggcgcgtgctaaagtgaataagcgagttttcatgctgacccactcaatgctattcagaaatcaattggcttagcactttctcatatccttaggtgcatttagattgccagagttaaccttctgcgtttaaaaaaagaaaaacactaaaaaataaaatacatgtatatacttaaaaaaaaataataaggtttccctcaagggaaaacagcagctacatgcttctttcctatactactgtagcaaaccaaggcattgatgagagggcatgcaaattgtgcttcactttacagtgttttatcagagcacttaataaaatgtaaggctggtatttatttgaagttgtacagtatgacttaattcacatctgttggaatagaaaatatattctgttgagtatttaagaggctgtacatgttttcttttgtgtttggattctttgtactttttcatgttcagtacatcaataaacaaagttgaagggaaaaaaaaa

SEQ ID NO: 463 - DNA, 2301 bp, Artificial Sequence
  FAAP20
cttttgtggggtcagtgcccacagggttgagcaccacgtgcctggctgggcagtgctcctgccagggtccccttctccactgtaggaaacacggctgctcctgcagccgcgtctgctctgctgcatctccagctcctgccaggcatggtgtgcgcggccccaagacagggagtttccatagagacagggtttcaccgtgttagccaggatggtctcgatctcctgacctcgtgatccgcccgcctcggcctcccaaagtgctgggattacaggcgtgagccaccacgcccggcccccagagccttagtctcagaatcacacccaccccacgcccagggcgtctgtcacagctttccaatccatgagcccatcaatcggactggacacagataaactgggacaggacgccgggtggcaaaggccgggagagctgggccactccctccaaaaggccccagacgcagctgcatcctggagtccttctgagaaatgtgggacctgccccagctccaccccaggtgaggggcaccagccagctccagagctgcctaccttccctgtcaggtgcacaggtcagcgccaggccaaccccagagcgagaacacctgtgctggactgagctggagcagcagggtggcctgcaccggggcagcgagggaggcgttggatggagccaccccacggctcctctgtgaaggtctgcacgtcactcagaaagttgaagcaaaccaagcagggttggagcccacagttcacagccggctgcacaggggatgcaccaagcacagtttcctatgacaagtggaaacctgtgcgccacagcaaaactccgtcaccacagcagcagatggctccgaagaagtggagcgttttcatcaggttcaactttgaaacctccaccatcaccatcaccagcaccgctgtgtcatgctgataacttgaggacaggcaggacaaggagcccaggtgcggcccggagcccactgaagtcttcactgtcggacccaagaccttttcctggacaccctttccgccggacctgtggggcccgggccgttcctaccggctgcttcacggggcaggagggcacctggaatcccccgccaggtccctgccccagcgcccggcacctgatccctgcagggcccccagggtggagcagcagccgtctgtggagggtgccgcggccctgcgcagctgccccatgtgccagaaggagttcgcccccaggtacttcaactcccgcccccacctgtgtcccgctggctcctaagctgcccccctacgtgtgggttgcgtctgagatgtggggcaggcgccactcacggaaaaaaggcatcagaggagcttccacatcatcggaacattttattcctcaggacgctacacgctcactttcctggcggagcaggtcagtgcatcgagttctgtttccgtggaaaatgtgcaccttggaaaccgcatgacagccccctcggcagggtccccgcggatccgccgcgacgcaggcacagcagcaagttcctccagcacgaagctggcctgcccgggcccaggtgtgagggactgttctgctcccagcagcgcccgctgacgcttccctctgcggtctcggcgcaagcgtctgtccctggccgccctcggagccgtgcccagcctggcatgcatatgcggtggttaaggatacagttaaagggtcaatcacgcgtgtccacgacagagacgcacgcggcctcacaccgactcctcggtggacagcaataatgggttgatatactcaaagccttcgaactctgactggtcgatcctctttatggcatccctgtgggcaaaggtggcaggggggaggggggtgaccgtgtgttcattcccttgggggaagcggagtcacgttcgcataagaatcctcccccaacgcccactggagagatgacaccaggcgggtgggactcaagggcaggctgggtcaccagctgcccaaggtgccggcctgccatggggctgcccgaggggtgctccagggacccgcacccagtgggactcactcatcgtctggggtcagctgcacgggctcgctggtgaactgtgtgtcaaagttgtccagaccgtagtcgtctgtgatctgtggctggaatggagggagcgcctgcttcttctccagcttggaaaaacaataggagaagggtcagctccgcgcgggcatcatccctaccagattgagtgttttgcacgcacttcaatcacaaaatgaaacagtgagaaagtcagcatttcaatctgcctaaaaaaaaaaaaaaaaaa

SEQ ID NO: 464 - DNA, 11788 bp, Artificial Sequence
  CSRNP3
attggttggctgccgcctgatggatagacgagggaggagtgtactctcttcagtgtgttctgacggagccgaagtacagaaaccatatttacaggtacatgtgacagcgttgcagctatgagtggaattttaaaggggaagtttgaagaagtcaacggctcctcaccctgctcttcagtgcaggaatcagatgatgaagttttcagctgtgacagtactgagagtgttgatagtgtcaatcgttcagttttaatgattttaccagaaaaaatgaggaaatatcaacagactgaaaatatgttttcagaggcatagaatcttcaggaaaatactggagttcctgagatctcaaggtacatgtgacagcactgcagcgatgagtggaattttaaagaggaagtttgaagaagttgacggctcctcaccctgctcctctgtgagggaatcagatgatgaagtttccagcagtgaaagtgctgacagtggggacagtgtcaatccatccacttctagtcattttaccccttcctccattctcaaaagggagaaacgactgaggacaaagaatgtacattttagttgtgtcaccgtgtactacttcaccaggaggcaaggcttcacaagtgtgcccagtcaagggggaagcaccctggggatgtccagccgccataacagcgtgcgccagtacactcttggcgagtttgcaagggagcaggagaggctccaccgggagatgttgagagaacaccttagggaggaaaagctgaactccttaaaactaaagatgactaagaatggcacagtagaatcagaagaagccagcactcttacactggatgacatttctgatgatgacattgacctggacaacacagaggtagatgagtacttcttcctacaacctttgccaacaaaaaaacgaagagctctgctgcgtgcctctggagtgaaaaagattgacgtggaagaaaagcacgaactccgagccatccgcctctcacgagaggactgtggctgtgactgccgagtgttctgtgatccagacacgtgcacctgcagcctggctggcattaagtgccaggtggatcgtatgtctttcccatgcggctgcactaaagaaggatgtagtaacacagcaggtagaattgaatttaatcctatccgtgttcggactcactttttgcacacaataatgaaacttgaactggagaaaaaccgagagcagcaaatccccacgctgaatggctgccacagtgagataagtgctcacagtagttctatgggccctgtcgctcactccgtagaatattcaatcgcagacagttttgagattgaaactgagccccaggctgcagtgctgcacctgcagtcggctgaagaattagattgccaaggagaggaggaggaagaagaggaggatgggagcagcttttgcagcggagtcacagattctagcacgcaaagcttggcacctagtgagtcagacgaggaggaggaggaagaagaagaggaagaggaggaggaggatgacgatgatgacaaaggagatggcttcgtggaaggtttgggcacccatgccgaagttgtccctcttccttcagttctttgttattctgatggcaccgccgttcacgaaagccatgcaaagaatgcttctttttatgccaactcttcaactctgtattaccaaatagatagccacattccaggaactccaaatcagatctctgagaactattctgaaagagacactgtcaaaaatggtaccctttcgctggtgccttacaccatgaccccggagcaattcgttgactatgcccgacaagcagaagaggcctatggtgcctcccactacccagctgccaacccctctgtaatcgtttgctgctcctcttccgaaaatgatagcggtgtgccctgcaatagtttatatcctgaacacaggtccaatcaccctcaagtggaatttcactcatacttgaaaggcccctcccaagaagggtttgtctctgcattgaatggtgacagtcacatttcagagcatcctgctgaaaattctttgagccttgcagaaaagagcatattgcatgaagagtgcatcaaatcacccgtggttgagacagtccctgtttagtagcttaaattattctaggaccaactcttctcttatttaaggcactgtatttaattggatttcctgggctcatcattgtttaaactgaagaccaagaaaacttggacggtggttaatcttccagactgtattttgttttttcctttctagccacatgactgtggcattgcacaaatacagtctctgtagggattttaaaagatttcagactgttttgatagaaaaagctaaattttaaaatgcatatctcacagttgcctacctgtcaaactgtgtgaaacctgccaatctgtgtagatcagagctccaaattttggattatcgggcctgtgcaagattgttaactaaggctgggaaataataagatttagagtcctaattttcaatatatctgaagataatgatgactttttaatgtaaaagtaattattgtaagaaaaagatttaattgttccatgtgtattttatttatggtagtttagaagacatgttttgatgaaaatgaacagccgcatgttcattcaagctgaagatgcatagctagttccacagagcatgcccacatggattgcatctggaatccattcacatttttatgatcatgactgatcagatttgcaaattcttaagggtgaaataggcctatttttgctattttggacaaataaatgattctatatgtgcaggtccttacacagttttctctaaagttaagagttaggacaatcctctggggagagtctagttcactgccctccctcagctgactccagagatggaggtagaaggaattgcctttcttttttaaacagcatcatcttgattcttagcttggacagcacctttaagctctaccccctacatcaaaatgcactttagtgccccttcacggtacctcgtgtggggtggggactgagaactctttgagatgaaaaaatttaaaaaaaaattaaaaagatctttaactattataaggttcatataattaatatagaggaatcatccaatgatacttatgaagggaaaatgacctattttccttcaccactctgaggacctaactcagtaaatgcagaggaggctgaggaaacatggaagagacacgacctcagcaaccagccttttctccagcgtgatcaatccatctctacaaaatcagtgtataatgagatttccacttagtgactagctgattgaaggggggcctctacccaaatactcaactaggcctttcttttctgaagcattttgatttgtcttgcctgggacaactagcagaacagtccagaatgcattgcatactttctaattacctcacattctcttattaaagagaacagatagaaataaaacatgcactccccacctttagattacctgcacttggttcgtcggaggacttctaggatcccgtttccctgtaaattaatttaggtaactaaatagtgtaattctgcctttttttttccaatgcaatatgactatgctaaacctgtttcatatttttgaccttctattgttatatcacttcacatgttttataactatttgaaatgcggacatgacttgctattcagtgactgcatcgctacttattttttatgtcttttagacttgggtgtttagaattatggatataaatatattgtagatctcaatttctaaaaaaaatattttatttaattgaacttaaaaatgcttgatctagagaaagtcctccagtggaaaagtttctactaaactttgttttggggaaaaaatgtttacttggcagctcttccactgtgcagttggtttctgccccttctcttcccccctacattgggccaaatttataactcttaatattaacattaaaagagctttgggtttgtctttatgtaggttgcagtaatgagagcagggttgttccttttgaatgattggccctttgggctaatcagaatgaggatttgttgaaatctcaaatatacatatatatatatatatatatatatatatatatatacacacacacacacacatacacatatatatacacatatatgtatgtgtgtgtgtgtgtgtgtgtgtgtgtatatatatatatcccatgttgtctgcaaagtgacagtttttagtgcttaatctccaaaattttccccctactgatacaatctaaagagcacaggcccaaagagaaaatgacaagaggctattgttccttcattcaagcacatgaaaggatcatgtgtactgtatttgctggaccattacaagctcttgaaggatctgcttgtgaagtactctgaggttattcttggaacacagagtgtgggagagtggggaagagccagctccagcctgagcaaagctgaagggtagaatgacagtccagtttctgaaaagagatattttaattttagttcagctttattttcctaagacgatatgaagcctacttttttatttttggctaggtctttgttttctagctttgtttccaaaaggatgcttaagaaaacagagtttttttcccctatccatttatctagggtagaaagtcactgccctgtgagaagaattacccttccaatcatgacagcttctattccaacttttcatatacctgactaacctgtaaacatatcccacaaaccacatacacaggctacctattaaaactctcccatatacctaacacatacacatgcacacacatacaaaatatatacatatcacacacttagagaatgacagatttcaggcaatggccaatagtcagtattgagtttttctaaccccagaatctggttgggctttatgatctaaaaaaatgtggtttagaaaagaggataattggtagagctgtagtttgaaaatatcaggtcaaagttgcaaacatacttatgatggaatcatttcatttttagttcctttcccagaaaagctgagagagcacactgttccagctgacttttttttccattaatagccgttctattcaacaaagagctgcccacatgccaggaaagtgctacagtccttctaagcttttaaaaatggggatcaagctacatgcagccagttggaatacttaagatctttatgccaagacacaataacctgacctgcagctgttgtattgcctccatagtatatctagccaaactgtagtctttgacacacaactttttagtcattcactatcaattgcaaagcttcatgctccagccctggctattctagtaccagtcctatacctttaaatgggacttaattcccagttataatcctggccgaattgatttgaaagtcaagtggctgaagcagcttgcatctcctttgtcattcccaatttcctttgggagaagtcaatgaaagagatttacttaagtttttcctccttatctcttgatcattaattattaagacatgggtaaaattcatttgtctcatgtcttttggttgattgaataatatagttactttttgaaagcccatcatttctttgtgataaaaccattttctcaatgtgacagccacatgtaaaatgtgaaactaatgtttcttagtatgtttaaaatcttcacaatcatatatggccctgcaatactccctgaattccttccctccaaaaaaaaactatgagttgcaaaaacactagttacgaattaatcaagaagcaaagagagtatgttaagtggctatgttctttaaaattttacattctaatagatgacttctaggcaaaattttggtatgattaccattaaacaggaaaacataccatgatttactttctataacttgctaatcactgtttcttttatttcaatttttgatattgttgcacaagtttatgactctttggtctttatattcaaaatttattaagtatcaattctttctttcaacaaatatgtactgaacacatgctgtgttagaacaactgtcttgggtagtaaaaagaggggaacactacaaattataatggataatattaatgaagggtggcatgaaataatcaagctttctcaaatcctcttaatatgtgattttatcaagtgacattagaaaaactgacatcagttcttgtctaattatatgtgagctgcaactaaaagatgcttcctttacctaaattatagaactcactggatcgcccttcatctctctccctccatctgaaatgtatgaattaaatcaggactcagctaggactgaatcaaatgaaaaagaaattttcgattaattgcttcttcaatgttagacctatataagtgatgctaaatttacaccagcaaactcctatcagacagtttcaaggaggatttgactcatgcataacccaggaaacatttcaggaaacttttaagacaacagtgtggaacacaatcactcttacttctatttataaaaagcctatcaaaacagcaaaatcctgttgcaaattccaaagacatcactttgcagcaggtggaaaacagagaggttgttagactccatcactttcagctggagttacaaaccatcaaattagcaggtggaaaatttatattctcagaagccaacaggagactgcctttttaaaaggtgtcatgaagccttctatttctccaaacaactcaatatttctctttaaaatggcatctctgttccttattctcttgatgacagtttgcagtgccattatagccagtgtattaaataccaggctttaatgggaagcacctttgtgctttcaaaggcaagacttgtctgtaattttaaattagaactgttggttgtattcttaccacaaccaaaacccaaagtttaaaggcttgattactctatattaggtctaatatgaattttcaccttctgattgcattactttttctgaaatctgctaactagtgctggaataacaaaaatgcctaagccaaaatgctgtagctctgcaccaacagcacagctcatcagatgttttctatagtagtaaagaatttgattgacttaattgaatatcagcaattttaatacccactagaattatggaagtatcagagtggaagtgaggacgcaataaaagcttaataagtggtggtgtcttctaggaattatgaaaaaaaaagctcagcagagctaagccagatcttattacatcataaagactagagttacaaatggcagccccaaacctagaaggggcagttacaatgtggacaccctttcagcccagttggtgctcacatctgctgaccaacattcatatcaattacatttttacagtctgtaagtcatttgatgctttagaaaataaaaacacacacctacagcattctaaagaaactattttgttaaaaaatttaaacacattttatattaaaataagtgatcaatgactttcatgattgtcaaaagtaaaaagtgcagacatttaaaaaagctcttctttcacattttacctaccaaatctagatattcaacgtgagtccttaaaacagtcacttctaaattttattttgactcctttcttggctttttcaaactggaccatgagacccccttcctaaacaatgcagttgttttgttttattctttttttccagaaattcaagctgaaacatttgatatgacctgtgttttacctggtgatcagttctcaggctagtctaagtctgtgctgtcttggcatgccttgggtttcctatcctgagagtggtaatgccagtagaatgatgggaaccaggagagtgaatacgaccagattcaaagcctaaaacaatatgtttcagtttacttttatatgtagattttttaaatattcacatctagcctggaattttagtaaatacagatacttgttgtatccatgggaaatgaggtcatttcaaagatgtaagtcacgttggtgactactttcttttacttgtgataaatatatcactatacagggtaattgcttttataaatttgatcctttgcattggcttataattcaagaaatgtcaacttcactgtgtcactttatgtcatctctcataaaagtttctggcaggactaaagtttcaaaggaatgtgatagaatttattttggataacatttgtattcagcatgctaatgatgtaactcctctctttatcattaccacggtgatagttaagttcattcgttaactcattttagtgacatgtgaggccatttaaatatttttaagataatgtatattgattagaaagggttagaaggagacaaatttatggtagaaattagccttgccattgtctaagttaatttatgtgacctgattgaacagttttagttgtaactttagagtagcttctttgttagaggatctctttcctttctcttttggttttctcccaatatttttatctgtcttgggattatcttaaaaggtatttattaatgagtatttggaagaaaattgacctagaaaatgtctcttttaaatttatctaggtacttgtatcaccagagaccttcatcaagtcctactgccacactggataaggccactacccccgacccttcttgtcagggacatggcttcctaataatggttttgctgttgtctctacataggggacctatggaaaaggagtttgaaatttctacctttgtagtacattgtatccaattttgttttgctcctccttttcatgtggtcaccaagcttttttccttagccattaaaaaagccacccctctttaaaacaaatttaaagatctatatacatttttgcaactttatttaataaaaaagagaagaaaaaataaaatctaaatctcaattaccctaaagtggaaaaacctaagtatctaacctaggaacttgttgcctggtggtggttgttgttgttgttgttttttaatttatttagtgttgatccttgagttatttaatggtatccaaatgatatctgaaagtgattgattttaagatgtaatagttggcaaagtcatttcatttgtgtctcaaacaaataaagcccactgccatgggttaccatctgaaccctgattcattaggcactagtcatgccaaatggggatctcagaatagtttaatcttttcaaagatactcacaatggccaactgtgtgtgaatactggaaagtttgagattcttctatattcttcaaatttatggtcctgagactaggagggatctccagaggtcatatggctcatcgatctaccaccagggaagactgtcacttaggcatgcccaacaggagagatcgccatctattcttaacatctctagggaaggcagtttccttggcaacacaattcagctctcttaggttttctcacaataagaaaatatcttggccagtctttgagggttaggcacctggcaacagttgtggtgatttgggccattgtactaggggattcaagggaagttgggtttccccctacatttggtgattattacattaatatatgatcattccataagtctcctaagaaatcagatttttaaagaaagacacggattcagagacaatggtctgtaacatgaccaacttttgacaaatatggctgtactaggttttcatttttgctgttgttgttgtttgtttttgtgattgctcttatgtcggtaggtaatgtcaggaaaagtgactgtttcagatccccagtacaaacatcagaactaggatcaaatgacttgacttttaagctgttccattttctaagaagttacaattacaaaaagtaagcattttctacattcttacttctaagtaatgaccttctcattaatctttccttggcttaaaatgacaaataagaatccaaagtttttccactcctcctgtgggagataggaatagttgtgaagagtctgatggaataaaatgactccagagatttacacagccaccatttgatcccagcctttgtccttgtgttatttaaacaatggcttcctgctttctcaggggtcaggaaaatgatttaaaaatttgtcttcttgacaaggcctgaaaacgaagggaggtgtcgtggagaaatggtgatttttctggttacatcacttgattcaagcactccctggagctttcaaagccttttttatctgctcagagttgacacccaactcagagtcagaactcaccagaagatgaggaacacccccgaaatcaatgtttcctttctccatgggatttttttcaatcttggtacagctgcatatctcccaaactcggatgctcttgtgaaatgacagccacatcagtgtggttactccccacaaataacactagggggaaatgaccttttttatttaaaaaaaaaaaaaaggctaatgctatagaatgatcatgtaaagaatgttgaataaaatttggcccatgttttaattgactctaggcacctctattgaaataagtctgaggcatagtttgtgaaacatgtttcaaaagtgtttgatgtataataaatgctagaaatttacagtacagaaatagtaaaaaaataaaataaaaataaacctgtagattacagctctgttcctaagaacctcagcctttattgtgtcttagtaaagttgatctgctttatttttagtttattgaatttctggtgtactagcctcttaagatagaacttttaatacatatgtactggttaatgcctgtttacgcagaaaatggcactttgttctttcagtgtgtttccctcagtgtcacagggtatatcaatttgatagatcatttgacatttgtcaaaaatacgtttcccattttaaaaatatgtataattggttgcatagacatatgtcactttttgcagtgtcttcatcttgatcatagttttagacatcaactatgtctcactttccaactgccatagaaatttggtacatttgcaaattctggtggaatctagtgagctgaatgtattggtagatcaaatgatccaaaggacttgggtgttatccttcagtctgtgttgaaccattcagatattgggaatggtccttacacaagggaagtcttttgagaatatttgttctcttattttttgtttgtttgttgctggcaaaaaaaaaagtaactttaaaaactcagaaaagccactgaactgtattttgtgaccttatgattagttttatctttcaactgatttttattgttacttttactcaatatcaacagtacttcaatagatatttattagttatgttcaatctaatgacttaaaacagttgaaaaggaggaaaatcaactccagtccacacatacagtcatgttacattaagatgtcatgttgtatgtcacacagtttctagattgatttctcttgtgtataagttataacatcaaaaatgccaaagggtatataaaataagctacaataatattcaacagaacttaacctggaccttatgttgtaataatttattcatattagctgtagtcttctgtatttatattttcagtatttattatgaatgacatggaaattcgtgtatttattgtggctttttattgcagtgtgtatatatatataacaaataagcatttttaagtcttatccttaagtttcttttattagtggcacttgtattatgctgtactttttattacatattgtacaatatcttgtccatttgtttgcagcagagtaaaaccggtttctaagttgta

SEQ ID NO: 465 - DNA, 3213 bp, Artificial Sequence
  NEXN
aacagctgcagccggcgctgggcccgcctggaatgcgggaacaggctgcacaccaggacttttatggaaacttgctgctggagacggcggcggcggcggcggcagcggcagccagaggactcccagcggctggagcagaagtgttagcggccagagctcccagacccctacccacagccaggcgggacgcgcacagtccctccacgcggaaagaagtaccttcgccggtcaccggctcctgcagggtgcaaatatatacagagcttcataatcagcccaagaccacatagagcaaacatgaatgatatttcccaaaaggctgagattaaagaaatgcttgcttctgatgatgaggaagatgtatcttctaaagtagaaaaggcttatgttccaaaattaacaggaactgtgaagggtagatttgctgaaatggagaaacaaagacaagaggaacaaaggaagagaacggaggaggaacgaaaacgcagaattgagcaggatatgttagaaaagaggaaaatacagcgtgaattagcaaaaagggctgaacagattgaggacataaacaatacgggaactgaatcagcatcagaggaaggagatgattcactacttataactgtggtacctgtcaaatcatataaaacatctggaaaaatgaaaaagaattttgaggatctagaaaaagaacgtgaagagaaagaaaggatcaagtacgaggaagataaaagaataagatatgaagaacaacgaccatctctcaaggaagcaaagtgtctttcattagttatggatgatgaaatagaaagtgaagcaaaaaaagaatcactttctcccggaaaattgaaactaacttttgaagaactggagcgacaaagacaagaaaaccgaaagaagcaagctgaagaggaagcaagaaaacgtttagaagaagagaagcgtgcttttgaagaagcaaggcggcaaatggtaaatgaagatgaggaaaaccaagacacagcaaaaatttttaaagggtaccgccctggtaaactcaaactcagttttgaagaaatggaaaggcaaagaagagaagatgaaaaaaggaaagcagaagaagaagccagaaggagaatagaggaagaaaagaaggcgtttgctgaagcaaggagaaatatggtagtagatgatgactccccagagatgtataagacaatctctcaagaatttcttacaccgggaaaactggaaattaattttgaagaattattaaaacaaaaaatggaagaagaaaaacgacgaacagaggaggaacggaagcataagctagaaatggagaaacaagaatttgaacaactgagacaggaaatgggagaggaagaggaagaaaatgaaacctttggattgagcagagaatatgaagaactgatcaaattaaaaaggagtggctctattcaagctaaaaacctaaaaagcaagtttgaaaaaattggacagttgtctgaaaaagaaatacagaaaaaaatagaagaagagcgagcaagaaggagagcaattgaccttgaaattaaagagcgagaagctgaaaattttcatgaggaagatgatgttgatgttaggcctgcaagaaaaagcgaggctccatttactcacaaagtgaatatgaaagctagatttgaacaaatggctaaggcaagagaagaagaagaacaaagaagaattgaagaacaaaagttactacgcatgcagtttgaacaaagggaaattgatgcagcactacaaaagaaaagagaagaggaggaggaggaagaaggtagcatcatgaatggctccactgctgaagatgaagagcaaaccagatcaggagctccatggttcaagaagcctcttaaaaacacatcagttgtagacagtgagccagtcagatttacggttaaagtaacaggagaacccaaaccagaaattacatggtggtttgaaggagaaatactgcaggatggagaagactatcaatatattgaaaggggagaaacttactgcctttacttaccagaaactttcccagaagatggaggagagtatatgtgtaaagcagtcaacaataaaggatctgcagctagtacctgtattcttaccattgaaagtaagaattaatcactctttttatcttttattctattaatttttttttccttaaaatcacttttcttcttctcttttttagctgatgactactagctcccctcccctctccctggaactttctctttcactccaactttcttactacatccatcttttctgtggcggggccaaaaaaggaaaccaggagtgccactatgctgacttcttattccttttcataacagtcttcaaagcacagctcatctaaagaatgcctacttcttttccaaataagcatcagatttatcgcctattatgcagtaacagtcaataaaatgtacttatgggggggaattactcaattattctatcagaacctattataaagactgtatttcccatagacgtttacagcaactatgtttaaaaaacaaaaacaaaaaaaaaacacacaaacctaagtagaatacattattttgcatgaaggaatgtcatttctgagctttttacacctaaaattaggctgaaatagctgagataattaatttggaacctatcaatttgagtggactttttctttagtagtacaccattttggttgttgtagtttcaaagtctttctgaagcagatatattgggattggagcggggtggggaaaactgtcactcctttcagaggaaaaggggaggagcatggagaaaaacaaaaattaaaggacttaaagaatggctatacagtgttgagtgttgaggatattaaacatgttatttttcaaacgtatgtaatatatattaaatttataaagcaaatttatgttgtgatcttgcctgaacaaattatattttaatgaaaaaactttctattaatagttcacgcaagagaaaacactttcaacatagtcgaaggcttcaagatctaagtgtatcagacttagggaaaaagtggcacaaccttcgatttaaaattctagtctttaaaatgagtttgtaaataattagctattacgttctattaagttgttttatattttaattttctggaagacaattttattttacaacgtgaacccaaataaagtaacttctgtatttaaaaaaaaaaaaaaaaaa

SEQ ID NO: 466 - DNA, 2546 bp, Artificial Sequence
  MYD88
agattcctacttcttacgccccccacatcacccgcctcgagacctcaagggtagaggtgggcacccccgcctccgcacttttgctcggggctccagattgtagggcagggcggcgcttctcggaaagcgaaagccggcggggcggggcgggtgccgcaggagaaagaggaagcgctggcagacaatgcgacccgaccgcgctgaggctccaggaccgcccgccatggctgcaggaggtcccggcgcggggtctgcggccccggtctcctccacatcctcccttcccctggctgctctcaacatgcgagtgcggcgccgcctgtctctgttcttgaacgtgcggacacaggtggcggccgactggaccgcgctggcggaggagatggactttgagtacttggagatccggcaactggagacacaagcggaccccactggcaggctgctggacgcctggcagggacgccctggcgcctctgtaggccgactgctcgagctgcttaccaagctgggccgcgacgacgtgctgctggagctgggacccagcattggtgccgccggatggtggtggttgtctctgatgattacctgcagagcaaggaatgtgacttccagaccaaatttgcactcagcctctctccaggtgcccatcagaagcgactgatccccatcaagtacaaggcaatgaagaaagagttccccagcatcctgaggttcatcactgtctgcgactacaccaacccctgcaccaaatcttggttctggactcgccttgccaaggccttgtccctgccctgaagactgttctgaggccctgggtgtgtgtgtatctgtctgcctgtccatgtacttctgccctgcctcctcctttcgttgtaggaggaatctgtgctctacttacctctcaattcctggagatgccaacttcacagacacgtctgcagcagctggacatcacatttcatgtcctgcatggaaccagtggctgtgagtggcatgtccacttgctggattatcagccaggacactatagaacaggaccagctgagactaagaaggaccagcagagccagctcagctctgagccattcacacatcttcaccctcagtttcctcacttgaggagtgggatggggagaacagagagtagctgtgtttgaatccctgtaggaaatggtgaagcatagctctgggtctcctgggggagaccaggcttggctgcgggagagctggctgttgctggactacatgctggccactgctgtgaccacgacactgctggggcagcttcttccacagtgatgcctactgatgcttcagtgcctctgcacaccgcccattccacttcctccttccccacagggcaggtggggaagcagtttggcccagcccaaggagaccccaccttgagccttatttcctaatgggtccacctctcatctgcatctttcacacctcccagcttctgcccaaccttcagcagtgacaagtccccaagagactcgcctgagcagcttgggctgcttttcatttccacctgtcaggatgcctgtggtcatgctctcagctccacctggcatgagaagggatcctggcctctggcatattcatcaagtatgagttctggggatgagtcactgtaatgatgtgagcagggagccttcctccctgggccacctgcagagagctttcccaccaactttgtaccttgattgccttacaaagttatttgtttacaaacagcgaccatataaaagcctcctgccccaaagcttgtgggcacatgggcacatacagactcacatacagacacacacatatatgtacagacatgtactctcacacacacaggcaccagcatacacacgtttttctaggtacagctcccaggaacagctaggtgggaaagtcccatcactgagggagcctaaccatgtccctgaacaaaaattgggcactcatctattccttttctcttgtgtccctactcattgaaaccaaactctggaaaggacccaatgtaccagtatttatacctctaatgaagcacagagagaggaagagagctgcttaaactcacacaacaatgaactgcagacacagctgttctctccctctctccttcccagagcaatttatactttaccctcaggctgtcctctggggagaaggtgccatggtcttaggtgtctgtgccccaggacagaccctaggaccctaaatccaatagaaaatgcatatctttgctccactttcagccaggctggagcaaggtaccttttcttaggatcttgggagggaatggatgcccctctctgcatgatcttgttgaggcatttagctgccatgcacctgtccccctttaatactgggcattttaaagccatctcaagaggcatcttctacatgttttgtacgcattaaaataatttcaaagatatctgagaaaagccgatatttgccattcttcctatatcctggaatatatcttgcatcctgagtttataataataaataatattctaccttggaaaaaaaaaaaaaaa

SEQ ID NO: 467 - DNA, 2345 bp, Artificial Sequence
  BANP
gcagagcggcggcttctctcgcgaggacggacgccattatcgcatctccccgacaaacaccacgagaattccgcagcccacacggtgaccaaaagccagccccactgtgagttgaactctttcgtgttgaccggccactctccgtgctctggatgatgtcggaacacgacctggccgatgtggttcagattgcagtggaagacctgagccctgaccacccagttgttttggagaatcatgtagtgacagatgaagacgaacctgctttgaaacgccagcgactagaaatcaattgccaggatccatctataaagtcattcctgtattccatcaaccagacaatctgcttgcggttggatagcattgaagccaaattgcaagccctggaggctacttgtaaatccttagaagaaaagctggatctggtcacgaacaagcagcacagccccatccaggtccccatggtggccggctcccctctcggggcaacccagacgtgcaacaaagtgcgatgcgtcgtcccccagactacagtaatactcaacaatgatcggcagaacgccattgtagccaagatggaagaccccttgagcaacagggcaccggattccctggaaaatgtcattagcaacgctgtgcctgggcgtcggcagaacaccattgtggtgaaggtgccgggccaagaagacagccaccacgaggacggggagagcggctcggaggccagcgactctgtgtccagctgtgggcaggcgggcagtcagagcatcgggagcaacgtcacgctcatcaccctgaactcggaagaggactaccccaatggcacctggctgggcgacgagaacaaccccgagatgcgggtacgctgcgccatcatcccctccgacatgctgcacatcagcaccaactgccgcacggccgagaagatggcgctcacgctgctggactacctcttccaccgcgaggtgcaggctgtgtccaacctctcggggcagggcaagcacgggaagaagcagctggacccgctcaccatctacggcatccggtgtcaccttttctataaatttggcatcacagaatccgactggtaccgaatcaagcagagcatcgactccaagtgccgcacggcgtggcggcgcaagcagcggggccagagcctggcggtcaagagcttctcgcggagaacgcccaactcgtcctcctactgcccttcagagccgatgatgagcaccccacctcctgccagcgagctcccgcagccacagccgcagccgcaggccctgcactacgcgctggccaacgcacagcaggtgcagatccaccagatcggagaagacggacaggtgcaagtaggacacctccacatcgcccaggtgccgcagggggagcaagtccagatcacgcaggacagcgagggcaacctccagatccatcacgtggggcaggacggtcaggtgctgcagggtgcacagctgatcgccgtggcctcctcggaccccgcggcggcgggcgtggatgggtcgccactccagggcagcgacatccaggttcagtacgtgcagctggcgccagtgagtgaccacacggccggggcacagacggccgaagccctgcagcccacgctacagccggagatgcagctcgagcacggggccatccagattcagtgagcggtgcccatggcaccaggagcccctcgccggctccgcctacggcccggcccccacgcgccctgctctcacggcctcggcacaggcagcggctgcacgtgttctgctgaagtgcgtctgaaggccgctgcctccgcggggaacagcatcctatcaactgaaagagcagccgccgccgcccccagccggagacccctttcgtttgagtcctgctgttggtgtcggagcacgaggggaggcacggtgcggagagcgtcgcatatgcgcgggaaatcaagaactatgatatttttctgtttaaacagctttttttaatttgctatggtgtttataacaaaaaagaaaatttgaaaaaaaaaatcccaggggagtagcaggagccctttgctgtgtgctctgtccagtgtcatgagacgggagccctttgctgtgtgctctgtccagtgtcatgagacgggagccctttgctgtgtgctctgtccagtgtcatgagacgggagccctttgctgtgtgctctgtccagtgtcatgaggcaggtgtttgcaaagccagctctcggttccgatggggtattgctgacctacttttctaggggaaatgctcttaaacactgtaattatgcatttctaatgaaataaaatgtatttatgaccacaaaaaaaaaaaaaaaaaaa

SEQ ID NO: 468 - DNA, 3957 bp, Artificial Sequence
  GBP5
cactgaggtcaccctccaggctgtggaacctttgttctttcactctttgcaataaatcttgctgctgctcactctttgggtccacactgcctttatgagctgtaacactcactgggaatgtctgcagcttcactcctgaagccagcgagaccacgaacccaccaggaggaacaaacaactccagacgcgcagccttaagagctgtaacactcaccgcgaaggtctgcagcttcactcctgagccagccagaccacgaacccaccagaaggaagaaactccaaacacatccgaacatcagaaggagcaaactcctgacacgccacctttaagaaccgtgacactcaacgctagggtccgcggcttcattcttgaagtcagtgagaccaagaacccaccaattccggacacggcaaagtaacatcctagacatggctttagagatccacatgtcagaccccatgtgcctcatcgagaactttaatgagcagctgaaggttaatcaggaagctttggagatcctgtctgccattacgcaacctgtagttgtggtagcgattgtgggcctctatcgcactggcaaatcctacctgatgaacaagctggctgggaagaacaagggcttctctgttgcatctacggtgcagtctcacaccaagggaatttggatatggtgtgtgcctcatcccaactggccaaatcacacattagttctgcttgacaccgagggcctgggagatgtagagaaggctgacaacaagaatgatatccagatctttgcactggcactcttactgagcagcacctttgtgtacaatactgtgaacaaaattgatcagggtgctatcgacctactgcacaatgtgacagaactgacagatctgctcaaggcaagaaactcacccgaccttgacagggttgaagatcctgctgactctgcgagcttcttcccagacttagtgtggactctgagagatttctgcttaggcctggaaatagatgggcaacttgtcacaccagatgaatacctggagaattccctaaggccaaagcaaggtagtgatcaaagagttcaaaatttcaatttgccccgtctgtgtatacagaagttctttccaaaaaagaaatgctttatctttgacttacctgctcaccaaaaaaagcttgcccaacttgaaacactgcctgatgatgagctagagcctgaatttgtgcaacaagtgacagaattctgttcctacatctttagccattctatgaccaagactcttccaggtggcatcatggtcaatggatctcgtctaaagaacctggtgctgacctatgtcaatgccatcagcagtggggatctgccttgcatagagaatgcagtcctggccttggctcagagagagaactcagctgcagtgcaaaaggccattgcccactatgaccagcaaatgggccagaaagtgcagctgcccatggaaaccctccaggagctgctggacctgcacaggaccagtgagagggaggccattgaagtcttcatgaaaaactctttcaaggatgtagaccaaagtttccagaaagaattggagactctactagatgcaaaacagaatgacatttgtaaacggaacctggaagcatcctcggattattgctcggctttacttaaggatatttttggtcctctagaagaagcagtgaagcagggaatttattctaagccaggaggccataatctcttcattcagaaaacagaagaactgaaggcaaagtactatcgggagcctcggaaaggaatacaggctgaagaagttctgcagaaatatttaaagtccaaggagtctgtgagtcatgcaatattacagactgaccaggctctcacagagacggaaaaaaagaagaaagaggcacaagtgaaagcagaagctgaaaaggctgaagcgcaaaggttggcggcgattcaaaggcagaacgagcaaatgatgcaggagagggagagactccatcaggaacaagtgagacaaatggagatagccaaacaaaattggctggcagagcaacagaaaatgcaggaacaacagatgcaggaacaggctgcacagctcagcacaacattccaagctcaaaatagaagccttctcagtgagctccagcacgcccagaggactgttaataacgatgatccatgtgttttactctaaagtgctaaatatgggagtttcctttttttactctttgtcactgatgacacaacagaaaagaaactgtagaccttgggacaatcaacatttaaataaactttataattattttttcaaactttcatatagagttataagattatgatgctggtatctggtaaaatgtacatcccagtagtccaatagtttaaatgtttattgcttcctttaagagattataaattgtataagggacattgtatcactgccttcatttatgcgtgatattgggatggtttcatcaggagatgctttccttgcatctcaatgtcatctgtctaatttctcataaggggattatgttacctagagcagggcttcccaaccctcaggccatagactagctctgatctgtggcctcttaggaacccggccacacagcaggaggtgagcagcaggtaagtgagcattacagcctgagctccacctcctgtcagatcagcagtgacattagattctcacaggagtgggaaccctattgtgaactgtgcatgcaaaagatctaggttgtgtgatccttgtggaacaatataaaccagaaaccaataacgccaccccacctccaacccccgccaaccctctgtggaaaaattaccttccacgaaactggtccctgatgccaaataggttgggggaccgctgacctagagggagttatgcacatgggcttataaggttagccaagagaaaggacaagaagacccaaagtcggcaagcaaatttattaacctgctgggctgctctacagaaatctgaggaggcagacaccgggcttacaggctaaggggtataagtaggtctgcaggggttttgtgtgtgtgtgcgggggtgtcgggggggcaaggccatttgtggagacttttcctcccagtatggccacatcctgcagtttgtcagtttttgcccccgcctggctcagggtaccaggatgtggtttagcttaggggtggttatagtggcacctaagttctgggaacttgcggtgggggcgaccttttggacgaaaaataagctgcagggcagctaggggagggggcttgttatattcctctgggggcagggtgtccctaactgggctcagtcggaaggaacttgaccaaagtctgggctcagttgggcatcactcaggctaatggtcgtgtgctggatgccatcagagggaagtaccaatggtaaagtggaaacaatgtgcagctttcaactgggtggaggctgctattctgtggacagtgagatgtttccttggcactgtcaatagacaatctgcgtagagaaattccaagctgaaagccaataatgttataataaaatagagattcttcagaagatgaaaggaattaccagcatggaaattgtgtcataggcttaagggctaaagaagaagccttttcttttctgttcaccctcaccaagagcacaacttaaatagggcattttataacctgaacacaatttatattggacttaattattatgtgtaatatgtttataatcctttagatcttataaatatgtggtataaggaatgccatataatgtgccaaaaatctgagtgcatttaatttaatgcttgcttatagtgctaaagttaaatgatcttaattctttgcaattatatatgaaaaatgactgatttttcttaaaatatgtaacttatataaatatatctgtttgtacagattttaaccataaaaacatttttggaaaaccataaaaaaaaaaaaaaaa

SEQ ID NO: 469 - DNA, 3302 bp, Artificial Sequence
  XIRP2
ggagaaatctggcaggtctctaggcagacaaaagggaacatctggtagggactgggacatgtagaaaaaaggacaacctggacccatccatgttcccaatgcagaagggctccctcaacctcctgaggcagaaatgggaatcttgtgattatcagagaagtgagtgtcatcccagggacagccattgtacaattttccagcctcaggaaagcaaattgcttgcgcctgaaggagaggtagtatcagcacctcaatctttggatcccacaagtctgccctacagtacaggggaagagatgtggagttcgaagccggaagagaaggattctgtggacaagagtaacaacaccagggaatatggtcggccagaagtgctgaaggaggattccctgagcagtcggcgcaggattgaacgcttttccattgcccttgatgagctgaggagtgtgtttgaggctcctaagagtggaaacaaaccagctgagtacggtggaaaggaagtggaaattgagcgaagtttgtgctcgccagcttttaagagtcaccctgggagccagctggaggattctgtgaaagattcagacaagaaaggcaaggaaacatcttttgacaagatgtcacctgaaagtggtcacagccgcatctttgaagcgactgctggccctaataagcctgagagtggatttgcagaagacagtgctgctcggggcgagggtgtgtcagacctccacgaagtggtctccctgaaggagcggatggcgaggtaccaggcagctgtttccaggggtgactgccgcagcttctctgctaatatgatggaagaatcagaaatgtgcgcagtgcctggtggtttggccaaggtgaagaaacaatttgaggacgaaattacttcttcccgtaatacctttgctcaataccaatatcaacatcagaacagatctgagcaggaggcaattcatagcagccaggttggcacttcaagaagcagccaggaaatggcaagaaatgaacaagaagggtccaaagtacagaaaattgatgttcatggaacagaaatggtctctcatcttgaaaagcacaccgaggaagtaaaccaagcatctcagtttcatcaatatgttcaagaaactgtcattgatacacctgaggatgaagagattccaaaggtttcgactaagttgttaaaagagcagtttgaaaagtctgcccaggaaaagatcctttattctgacaaagagatgacaaccccagccaagcagattaagaagctgctgctccaagacaaggaaatatgtatactttgtcaaaagacagtttatccaatggagtgcctagtggcagacaagcagaattttcataagtcctgcttccgatgccaccattgcaacagtaaactaagtttgggaaattatgcatcacttcatggacaaatatactgtaaacctcactttaaacaacttttcaaatccaaaggaaattatgatgaaggttttggacataagcagcataaagatagatggaactgcaaaaaccaaagcagatcagtggactttattcctaatgaagaaccaaatatgtgtaaaaatattgcagaaaacacccttgtacctggagatcgtaatgaacatttagatgctggtaacagtgaagggcaaaggaatgatttgagaaaattaggggaaaggggaaaattaaaagtcatttggcctccttccaaggagatccctaagaaaaccttaccctttgaggaagagctcaaaatgagtaaacctaagtggccacctgaaatgacaaccctgctatcccctgaatttaaaagtgaatctctgctagaagatgttagaactccagaaaataaaggacaaagacaagatcactttccatttttgcagccttatctacagtccacccatgtttgtcagaaagaggatgttataggaatcaaagaaatgaaaatgcctgaaggaagaaaagatgaaaagaaggaaggaaggaagaatgtgcaagataggccgagtgaagctgaagacacaaagagtaacaggaaaagtgctatggatcttaatgacaacaataatgtgattgtgcagagtgctgaaaaggagaaaaatgaaaaaactaaccaaactaatggtgcagaagttttacaggttactaacactgatgatgagatgatgccagaaaatcataaagaaaatttgaataagaataataataacaattatgtagcagtctcatatctgaataattgcaggcagaagacatctattttagaatttcttgatctattacccttgtcgagtgaagcaaatgacactgcaaatgaatatgaaattgagaagttagaaaatacatctagaatctcagagttacttggtatatttgaatctgaaaagacttattcgaggaatgtactagcaatggctctgaagaaacagactgacagagcagctgctggcagtcctgtgcagcctgctccaaaaccaagcctcagcagaggccttatggtaaaggggggaagttcaatcatctctcctgatacaaatctcttaaacattaaaggaagccattcaaagagcaaaaatttacactttttcttttctaacaccgtgaaaatcactgcattttccaagaaaaatgagaacattttcaattgtgatttaatagattctgtagatcaaattaaaaatatgccatgcttggatttaagggaatttggaaaggatgttaaaccttggcatgttgaaacaacagaagctgcccgcaataatgaaaacacaggttttgatgctctgagccatgaatgtacagctaagcctttgtttcccagagtggaggtgcagtcagaacaactcacggtggaagagcagattaaaagaaacaggtgctacagtgacactgagtaaaatatctatggccactgacagtccacacttaggcactgagagatattgatgttctgaaataagattttatgaatttggatacccttttgaggaacttgatgtaaacatggtgttcagaaatctcgtgtctatctcaatgggatatttcttgtattacaccttgtcatttttttcacaatttatttacatctacttttgtttgaactggaatgaagagatgaaacactatggatatgttttccattcaaatggcactttagcatattgttctgttttcctgtaaaacatcatgggtgtgatttttatactgctgctgcttgtcacaattattataacttctctgtaatttcctctgaaataaaattgaatcacctgaggtgcaaaccaaaaaaaaaa

SEQ ID NO: 470 - DNA, 353 bp, Artificial Sequence
  PRR4
caacgcagagttgggagcaactccagagcctccttcaagatgctgctggtcctgctctcagtggtccttctggctctgagctcagctcagagcacagataatgatgtgaactatgaagactttactttcaccataccagcctgcaggaagcatcatcattcttccagagggacagaccagcaagacatccccaggagcaaccactctggtaatctagaattcagtggcagaaaataaataagaagataacttccttcagaaagccatgacattgaaataatgtggtcataactctttcttcagtataccaataaaatattaatagcatgcaaaaaaaaaaaaaaaaaaaaaaa

SEQ ID NO: 471 - DNA, 1839 bp, Artificial Sequence
  GFAP
atcgccagtctagcccactccttcataaagccctcgcatcccaggagcgagcagagccagagcaggatggagaggagacgcatcacctccgctgctcgccgctcctacgtctcctcaggggagatgatggtggggggcctggctcctggccgccgtctgggtcctggcacccgcctctccctggctcgaatgccccctccactcccgacccgggtggatttctccctggctggggcactcaatgctggcttcaaggagacccgggccagtgagcgggcagagatgatggagctcaatgaccgctttgccagctacatcgagaaggttcgcttcctggaacagcaaaacaaggcgctggctgctgagctgaaccagctgcgggccaaggagcccaccaagctggcagacgtctaccaggctgagctgcgagagctgcggctgcggctcgatcaactcaccgccaacagcgcccggctggaggttgagagggacaatctggcacaggacctggccactgtgaggcagaagctccaggatgaaaccaacctgaggctggaagccgagaacaacctggctgcctatagacaggaagcagatgaagccaccctggcccgtctggatctggagaggaagattgagtcgctggaggaggagatccggttcttgaggaagatccacgaggaggaggttcgggaactccaggagcagctggcccgacagcaggtccatgtggagcttgacgtggccaagccagacctcaccgcagccctgaaagagatccgcacgcagtatgaggcaatggcgtccagcaacatgcatgaagccgaagagtggtaccgctccaagtttgcagacctgacagacgctgctgcccgcaacgcggagctgctccgccaggccaagcacgaagccaacgactaccggcgccagttgcagtccttgacctgcgacctggagtctctgcgcggcacgaacgagtccctggagaggcagatgcgcgagcaggaggagcggcacgtgcgggaggcggccagttatcaggaggcgctggcgcggctggaggaagaggggcagagcctcaaggacgagatggcccgccacttgcaggagtaccaggacctgctcaatgtcaagctggccctggacatcgagatcgccacctacaggaagctgctagagggcgaggagaaccggatcaccattcccgtgcagaccttctccaacctgcagattcgagggggcaaaagcaccaaagacggggaaaatcacaaggtcacaagatatctcaaaagcctcacaatacgagttataccaatacaggctcaccagattgtaaatggaacgccgccggctcgcggttagctgcctgcctctcagacacggcgctttgcccagcttgacagggagtgagcctcacccaccccatcctcccaatccccctgagttccctcttcccaggcttcccctaaagggcctggactgcgtcattttcccaggaactgcagtgcccagcccaggacgtggtacagagtaactgtacattaaactggcagagcttgttagtggtaaaggtggtgagtccttgggtgcgcagtggagctgctctggggcctctgagcaagcagcagcctctgtctcacctcttcctgtcactgggagggccccttgggtctcgctgtgcctggacgccaggctctctgctttattctttcatccctgaggctccatcgctcagctcagtgctgactcagttcagaggattcttccctcaggaccgcagctcttgcagtgaataaagttttatgttccctgctcttaatgttaaatattaaaaaaaaa

SEQ ID NO: 472 - DNA, 2346 bp, Artificial Sequence
  SLAIN1
agtgctgctcttttccccagtgttttcggagggatgacgggggatggtaggggttggcctctgtctgcgactgttactgttctttcgttttaaacgaacgctggacaggatttgcgtgctcttcctcctcgggtggcatcggaagccgcgcagtgatggatctctctttatagagaggttatacattggctcttcaaagacgttcacctcatcagagaaatccctgactcctttgcagtggtgtagacatgtcctagataacccaactcctgagatggaagcagcgagacgttccctgtgctttagactggagcaaggttacacttccaggggctccccactcagtccccagtcatctatcgacagtgagctgagtacttcagaattggaggatgattctatctccatgggatataaattacaggacctcactgatgttcagatcatggctcgtctgcaagaagaaagtctcaggcaagattatgcttctacttcagcatctgtatcaagacatagttccagtgtgtcattgagttcaggaaaaaaagggacatgtagtgatcaagaatatgaccaatacagtctggaggatgaagaggaatttgatcatttgccaccacctcagcctcgtcttccaagatgttcccctttccaaagaggaattccccattcacagactttctccagcattcgggagtgtaggaggagccccagttcccagtattttccttcaaataattaccagcagcaacagtattattcacctcaagcccaaactccagatcagcaaccaaataggaccaatggagataagctccgaagaagtatgcctaacctagcccggatgccaagtacaactgccattagtagcaacattagttctccggtcaccgtgcgaaatagtcagagttttgactcaagcttgcatggagctggaaatggaatttcaagaatacaatcttgtattccatcaccgggacagcttcaacacagggtccacagcgtggggcatttcccagtgtctatccgacagcctcttaaagccacagcctatgtgagtccaaccgttcaaggcagcagtaacatgcctttatcaaacggcttacagctgtattccaacacaggaatccccacaccgaacaaagctgcagcttctgggataatgggtcgcagtgcactcccaagaccttcgttggcaataaatgggagtaacctgcctcgaagcaaaattgcacaacctgttagaagttttcttcagcctccaaagcctctgtcttcactcagcactctgagggatggaaattggagagatggttgctactaatgcagttttatgtacccttgaaaaatgggaaagaagtaaaaatgagggttgtgttacctagctggctgggtagcagtggatgttgggatattctttcccttttgtgttttaatatatttactgcattgtttctcaatggaccagtcaccagagactaattattgcacttaaatatttgcctgagatactgcaacattctcaaacccatggttgcagtattgtgacacttagatctaggaagtttttgtagaactgctctgtacctgaatactttttgagagaattaagatgtatcaataatgctttgccatatgagttttttaaagtaacttgttcaatttactcacgtgttctaaacatctttccattacatgttctgtattttaatacattgcatattgacaactaggttctataatgtatgctttgaaatttacttttttatagtttacaggaattttattttttgtgcctatttctttttacacctatgtgaaccactatggaacaacttaaattttgtgccataaaaatatttttgtggtaaggtactatttttttagctctagggatatatcagcaaaaacacatcatgcaatttgagacacataattttgtgttgaatgagcacaacataatttgaagcattgcaaggagataaccagacagcagaattaaatggtcctgtctttttcatttttaatttattgtcatacatgggtttcatatttataacggcatcatgagctcattgcacttaatacctgcaatgtttgctactgtaccacaattgattttcaatactttattacgaaggatgaaactgtaatgttttattaacaatgcttctggaaatgaatgcattttaaagcaaataaatctttttgatagaccttttacaaaatccatttgcactaatgaatgctttcttatggcatataacttaatatttgttactgtgtacactgctgttttggaatgttcagaaataaagactctatttcagcaatatcaggtcatgc

SEQ ID NO: 473 - DNA, 2709 bp, Artificial Sequence
  PDLIM3
cggtgacgtcacccccagcggggataaagcgcccccgcccgggtcggggccaggacgccgcccggcgcggagtggctgccctgcgcggggacactcagagcccggtgggcgggaggaaggcggcatgccccagacggtgatcctcccgggccctgcgccctggggcttcaggctctcagggggcatagacttcaaccagcctttggtcatcaccaggattacaccaggaagcaaggcggcagctgccaacctgtgtcctggagatgtcatcctggctattgacggctttgggacagagtccatgactcatgctgatgcgcaggacaggattaaagcagcagctcaccagctgtgtctcaaaattgacaggggagaaactcacttatggtctccacaagtatctgaagatgggaaagcccatcctttcaaaatcaacttagaatcagaaccacaggaattcaaacccattggtaccgcgcacaacagaagggcccagccttttgttgcagctgcaaacattgatgacaaaagacaggtagtgagcgcttcctataactcgccaattgggctctattcaactagcaatatacaagatgcgcttcacggacagctgcggggtctcattcctagctcacctcaaaacgagcccacagcctcggtgccccccgagtcggacgtgtaccggatgctccacgacaatcggaatgagcccacacagcctcgccagtcgggctccttcagagtgctccagggaatggtggacgatggctctgatgaccgtccggctggaacgcggagtgtgagagctccggtgacgaaagtccatggcggttcaggcggggcacagaggatgccgctctgtgacaaatgtgggagtggcatagtcggtgctgtggtgaaggcgcgggataagtaccggcaccctgagtgcttcgtgtgtgccgactgcaacctcaacctcaagcaaaagggctacttcttcatagaaggggagctgtactgcgaaacccacgcaagagcccgcacaaagcccccagagggctatgacacggtcactctgtatcccaaagcttaagtctctgcaggcgtggcacgcacgcacgcacccacccacgcgcacttacacgagaagacattcatggctttgggcagaaggattgtgcagattgtcaactccaaatctaaagtcaaggctttagacctttatcctattgtttattgaggaaaaggaatgggaggcaaatgcctgctatgtgaaaaaaacatacacttagctatgttttgcaactctttttggggctagcaataatgatatttaaagcaataattttttgtatgtcatactccacaatttacatgtatattacagccatcaaacacataaacatcaagatatttgaaggactctaattgtctttccttgacaagttgattttgcaattgtggtaaatagcaaataacaatcttgtattctaacataatctgcagttgtctgtatgtgttttaactattacagtgcatgttagggagaaattccctgaatttctttagttttgtattcaaacaattatgccactcgatgcaacaaacataataaatacataaaagatttaaaaaatacctaatgaagtggcattcattgaattcaaataaaatcaacatttcaatgagagaacccaatcatattttaacatgtacactaacaaatattttaagataaatgtggcttcttcaggttttataactcattactctttcttatgagcacaaaatttctgatgatagaagcgttgaaatttgctagttaaaggtagttcagtctctttcaaattaaaagtttcacttgcttcaacagagactctttcaatttaaatatctctttcagatcaatattcagtcaaattgaaggttcaaagtccatcactgctgtttcttaggctcaatggttcaccacctcctcctcttcccaagatggcatctccaggaagaaacaatttagacgacttcctaaggaaggcaggggctgctggtctcctggggtcctgcttgtatccactgttgaaatccttggtttcacttgtgatctgtggtctgttttcttgacatagttgaggccaggcaataataacacctccactaccacctccaaaactctcagctcagctttcctggagtcatggatcctctgtctgagacatgcactctgcctggccctggcgcaggcagcctaccttgcaggctctgcatggcgttaccttgcctctcacccagggtgcccatggcaatgctcctgacttgcatctctcacctactttccatgtcccccactggggacgtacaggaacttctgaaactgtcccctcaggttcaaaccatggggaaccagcagggtggggaccctcagaccctctgtctcaccaccttgtgtcacatggtcatctctaccacccctcaacccccacagctgctaacttctggcctgaaacaagtgttctcctcccataaggtcccaaatgggacacaagttttattgctctgggattcttccaaacttaactgactctgaccctgacctgttcaggattttgagaggagccaaaacacgtgcctggcccctgtaggcatttgacattgcaactcctgtgccaacacatgcattcactaacaaagctattaaaaaaataaaacagacttttgagatcaaagaaa

SEQ ID NO: 474 - DNA, 5450 bp, Artificial Sequence
  HMGCS1
attggctgtgggagccaccgtcccgcctcccagcgactctcggcggtgccggagtcgggtgggttggcggctataaagctggtggcgaaggggaggcgccgcggactgtcctttcgtggctcactccctttcctctgctgccgctcggtcacgcttgtgcccgaaggaggaaacagtgacagacctggagactgcagttctctatccttcacacagctctttcaccatgcctggatcacttcctttgaatgcagaagcttgctggccaaaagatgtgggaattgttgcccttgagatctattttccttctcaatatgttgatcaagcagagttggaaaaatatgatggtgtagatgctggaaagtataccattggcttgggccaggccaagatgggcttctgcacagatagagaagatattaactctctttgcatgactgtggttcagaatcttatggagagaaataacctttcctatgattgcattgggcggctggaagttggaacagagacaatcatcgacaaatcaaagtctgtgaagactaatttgatgcagctgtttgaagagtctgggaatacagatatagaaggaatcgacacaactaatgcatgctatggaggcacagctgctgtcttcaatgctgttaactggattgagtccagctcttgggatggacggtatgccctggtagttgcaggagatattgctgtatatgccacaggaaatgctagacctacaggtggagttggagcagtagctctgctaattgggccaaatgctcctttaatttttgaacgagggcttcgtgggacacatatgcaacatgcctatgatttttacaagcctgatatgctatctgaatatcctatagtagatggaaaactctccatacagtgctacctcagtgcattagaccgctgctattctgtctactgcaaaaagatccatgcccagtggcagaaagagggaaatgataaagattttaccttgaatgattttggcttcatgatctttcactcaccatattgtaaactggttcagaaatctctagctcggatgttgctgaatgacttccttaatgaccagaatagagataaaaatagtatctatagtggcctggaagcctttggggatgttaaattagaagacacctactttgatagagatgtggagaaggcatttatgaaggctagctctgaactcttcagtcagaaaacaaaggcatctttacttgtatcaaatcaaaatggaaatatgtacacatcttcagtatatggttcccttgcatctgttctagcacagtactcacctcagcaattagcagggaagagaattggagtgttttcttatggttctggtttggctgccactctgtactctcttaaagtcacacaagatgctacaccggggtctgctcttgataaaataacagcaagtttatgtgatcttaaatcaaggcttgattcaagaactggtgtggcaccagatgtcttcgctgaaaacatgaagctcagagaggacacccatcatttggtcaactatattccccagggttcaatagattcactctttgaaggaacgtggtacttagttagggtggatgaaaagcacagaagaacttacgctcggcgtcccactccaaatgatgacactttggatgaaggagtaggacttgtgcattcaaacatagcaactgagcatattccaagccctgccaagaaagtaccaagactccctgccacagcagcagaacctgaagcagctgtcattagtaatggggaacattaagatactctgtgaggtgcaagacttcagggtggggtgggcatggggtgggggtatgggaacagttggaggaatgggatatctggggataattttaaaggattacatgttatgtaaatttttatgtgactgacatggagcctggatgactatcgtgtacttgggaaagtctctttgctctatttgctgacatgcttcctgttgtggtctggccaatgccaaatgtactcgaatgatgttaagggctctgtaaaacttcatacctctttggccatttgtatgcatgatgtttggtttttaaacatggtataatgaattgtgtacttctgtcagaagaaagcagaggtactaatctccaattaaaaaattttttaacatgtaagaattttgtactttgaacaacaagattacagaaagtacctgtggtttttggaaaacatttctagcttggggaatgtgacaacattccccagtgtggtaaaattggggtaaaatgtggtaaaatgtgatacgcacaaaccctttgaaaatagcaaaacaaacatgccctttttctaaaattgataaatcctaaagaggaagaaaagagctgggacaataaaacactggctctggaatctggaatgttaagtccaggccagcagtgacaaaagttattgtaatgacctctgaacagagaaacactgccattgaagaggcttctggtatagaaaacatggtacattcaggagctgtgaatatagctctaggtgtgctcctgaatcagttcatggtagattatgctgaacaacagtgagatgttattggaggtgtggatgagggagtttgttgttgcagtccttctttgcaccttattttaaagaataaatgaaacatttttctggttacttttttaaaaatttaaaatggaagggaagaataggggcagggcattattaggctatttctgatgcttcagtgttataaattcaacatagaggctgacaacctaaattcatggtgtaacacagctcttttccttttccttttttttttttttttggtatctgttcaatgaaaataaggtatgacccaagtttttacctagtctgactagaagtattccacttcaaggtctgaagtaggacttttaccttaaaaaacaacaacaaacaaaactatcacacaggatagataagaagattggttaaacagttttgtgtagatctttttggtgctgaactatgacatgagccttatagattgtaaaatagggatagttggaactaatgtacagaactaaattttttaaactttatttgctgttaaattctgtgaagtttcagttatctaaaataaatatacacaaatatgaaatataatgtttcagattgcaaggtaatatgtaatagtagtgtttgtaagatactcttgtctaatattaactagtagtattttgatttgtacagtcataatttgttaaaatgacttcatttaacattcactgatgtagattaataatgtaagttctgatttaaagaatggtggcaaaatggtgcatgtaatacttttgcaagtgttggggagatcggtatgttttgaaaagagtaatttaacttttgggtgccaggaaatgggttttctcaaagtccattgccggcaatgggcaggcctgcaaatactggcacagagcattaatcatacaccttattaacggtgaggtgaataactttgaaataaagttttagagaaatgtttcagatacttgagtattctttttcactcttgaactaacaacttcggcaagaaatcagctaatattctatttttaaatatgggcattaatttcatttcagttcgttcactcattccattcatttatcatttcacaaacatttgaaatcctaatataagcaaggtgctctgtttaaggcagaaatttgaaaatgtacaagatatatggtcttgtctttaaggagctgttcatctagaatggaggaatttacactgataattattcctacacttgaaacaaagaaattaactctcaaattgcgtggcaagcatatatagactttgctataaatatttatgaaatgagttactgttttccttaaaaaagctaagactaagggctggcaatcaaataagagcaaatttagtggtgaacgtagaactgcccactaccagctagagtctccaacctaaaagtcccatgttgctagtgatccccaggggttttatagaaggaatccctgcattggcagtaattttggattagatgatccctaagagcaccatcaagtcttaggattctatgaattaggaaataaaccaaattatatattttctaatactgatcagctcatattttatcatcatgtcatgtctggctttcatacttagtcataatttactttctgggtcatttagaggctagcgttctctaaggtcacttctgcttgcacattgtaggatattatttagtatggctttaagaattcaatctttccccctctcctttatggaatgtgtgtttcctctatttgtacacttaaccttttgtcctaagtttttatttttatggatactaatgagtaactttgaggttgacactagacccaaacagatgcaaacagccactttctgtcctcttgtgacacagttgaaacactttatctcttgtctgctgtttggagtgtcctgaaagaaacactgaagtggcagtcaacagagcaagggtaacaggatctttaaataatttaaagttgtctgatcttgacataaaagtgaaccctttctttaaaatttctagcaactgctcttaagtcataggttcctcattttttctttgctggtagtgggagaaaatagttgatctgtgatttttgttttcatctccccaaactatgttataaaggcagtaatttgatgctgaagattatgattagaaatcctcagatgggttatatattggggctttatcttttaatattaaaaagaatgtctttcctggactactttattcagtagtaagcactattcattctatgtatattccttattcagccttgcagactcctgtgggatctgatctcttcctgcttcaactcagtaccatactcaccaaggcttagtatgtcttcacccactctcccttctcttgcattcctcaaacatgctgagtttattccagccttaagcctttgatctacgcatcagaaatgttgggccccacttcagatcttctctgccctgccttctactccagtcactgctgtggtaactaattccatgaagtctttgaccaggttctcagagaatatgatagtacctctctttggattctagctgtatacctttcacttcagcctccctgacgtggaatgtctgcagaacttgtttggtactcccaattgcacagcccaaaggtgcaggggagttaggtgcccatggggccatccttgacctaggtggaaagttgctagtggataactgattactcttttcatcacctgggcagacagttctgaaatgcatttcgtaagtctcctcaaaagaggaggagacttctgtggcgggtttggcaataaccatccttatattggctttcctcttttgtttcactcctgtgcatctctcttgcatcctgggatcgcttctcaaataaatgactttcattcaa

SEQ ID NO: 475 - DNA, 1350 bp, Artificial Sequence
  CRISP2
acacgtggcgcctggcaagtgaacaatcgcggtgagaggggcgcgccgcagctcctcaacgccgcaacgcgccggcccaactgcaggaagggttataaaattatacaccatggccctcctaaagacactctaggaaaaccatgtcatcctgatcttaaaacacctgcaagaaagagcacagtacttcaccattatttccagcaatggctttactaccggtgttgtttctggttactgtgctgcttccatctttacctgcagaaggaaaggatcccgcttttactgctttgttaaccacccagttgcaagtgcaaagggagattgtaaataaacacaatgaactaaggaaagcagtctctccacctgccagtaacatgctaaagatggaatggagcagagaggtaacaacgaatgcccaaaggtgggcaaacaagtgcactttacaacatagtgatccagaggaccgcaaaaccagtacaagatgtggtgagaatctctatatgtcaagtgaccctacttcctggtcttctgcaatccaaagctggtatgacgagatcctagattttgtctatggtgtaggaccaaagagtcccaatgcagttgttggacattatactcagcttgtttggtactcgacttaccaggtaggctgtggaattgcctactgtcccaatcaagatagtctaaaatactactatgtttgccaatattgtcctgctggtaataatatgaatagaaagaataccccgtaccaacaaggaacaccttgtgccggttgccctgatgactgtgacaaaggactatgcaccaatagttgccagtatcaagatctcctaagtaactgtgattccttgaagaatacagctggctgtgaacatgagttactcaaggaaaagtgcaaggctacttgcctatgtgagaacaaaatttactgatttacctagtgagcattgtgcaagactgcatggataagggctgcatcatttaattgcgacataccagtggaaattgtatgtatgttagtgacaaatttgatttcaaagagcaatgcatcttctcccccagatcatcacagaaatcactttcaggcaatgatttacaaaagtagcatagtagatgatgacaactgtgaactctgacataaatttagtgctttataacgaactgaatcaggttgaggattttgaaaactgtataaccataggatttaggtcactaggactttggatcaaaatggtgcattacgtatttcctgaaacatgctaaagaagaagactgtaacatcattgccattcctactacctgagtttttacttgcataaacaataaattcaaagctttacatctgcc

SEQ ID NO: 476 - DNA, 3695 bp, Artificial Sequence
  SZRD1
agataacgcgttggcccttaagaaagatggcatctttccgccttctctgcccccttccaagatggctgccctaatgtacacttgggaccttgcctggcgcctcttccgggcttggcagcgggcggggtccattgagtaaagccttgcgtgcctgcgcccgcgacggaggcgcgcttcaaagcgcaggcgcggggagggggtgggggaggagggaaagcggcgagtaagatggaagatgaggaggtcgctgagagctgggaagaggcggcagacagcggggaaatagacagacggttggaaaaaaaactgaagatcacacaaaaagagagcaggaaatccaaatctcctcccaaagtgcccattgtgattcaggacgatagccttcccgcggggccccctccacagatccgcatcctcaagaggcccaccagcaacggtgtggtcagcagccccaactccaccagcaggcccacccttccagtcaagtccctagcacagcgagaggccgagtacgccgaggcccggaagcggatcctgggcagcgccagccccgaggaggagcaggagaaacccatcctcgacaggccaaccaggatctcccaacccgaagacagcaggcagcccaataatgtgatcagacagcctttgggtcctgatgggtctcaaggcttcaaacagcgcagataaatgcaggcaagaaaagatgccgccgttgctgccgtcaccgcctcctgggtcgtccgccacgggttgcactgccgtggcagacagctggacttgagcagagggaacgacctgacttacttgcactgtgatcccccttgctccgcccactgtgaccttgaaccccatgcactgtgacctccccccttctcccccttcccactgtgattggcacatcgacaagggctgtcccaagtcaatggaaagggaaagggtgggggttaggggaaggttggggggacccagcaaggactcagagagtcagacagtgccacttggccacttggggtaaagccagtgccagcaataacagtttatcatgctcattaatttgggatttcaaaacacaaatgaaaactcacacccacccacccccaagtgcatgtctccatcacttaaaaagtaagttccatttgaaaatatcctttcttttttttttcttcctatttttgtttgtttatacaaatatctgatttgcaagaaaaagtgcatgggaggggttttagtggtttaatgaatttttaattaagaaagggtagtttggtagtctacttaaaaatgtttctgggaaattcactagaaacattaaccaataggattttggtgagcttagcttctgtattcctactgccgcccagaaaaggggcagggctctgcagccgccaggacagacgagcaccccatgcctatacctccctccccgagctaagtcccagggcatctgggccttgcctggagactgggctagctctgtaggctcggagagcctggggagggtgccaaccccacctctagtattttgggagatagggaaagtgaaccgacttccccttcccatacccctcagggtggttccctaccagccaggcttactacttctagaagaaagcagagtgccagggagtgagattgcatccctgggcttagaagtgacggagagaagacttgtttagtattttgccatcagcacaaggaaaaccaggagagagtctgcctccaggactctgagccttctgcctcgtatgttcagaaggtggataggtcttcccactccagcatggcttgaactcttaggggtctgcagtgctccatctccattggtggccccagctcagtaactatacctggtacatttcctgtgtgcaatcagtaccttgaaggcagaacattctgaataaagttggaaaaagaacagctttgctttgcaaagattgatgacagactggttcctcagaggcctaggctacccgtcacccctttttccagagcgagggcctggaatgaaggcagtttatcctctgtccctggagcctggggtttgctttggctccttgaggtggaagagactaagagggcagctgcccagagcagctgtgtgtacctggctcctctcaggcttcctgatcccttccgttgcactgcgccttatccctcagccagccagacagcctccctgctcctgaccagcagatacgtttcggagtggttggtgtggtttttgtgatgagggcagcacgtggtggccaaggtggcaagctgagtctcacaggctcactccctcgttggttccctgtgggaatggtaggccaggcccagtaagccatgccccaacacgtcctctcctccggaggaagggccagctgccagctgagtcagcagctagtccatagcacagccttataactgtaaagccaggcattgcccatgagcagagctggaaccagagcttcagtcagtaagagggaggattaccttcaggagaaggcaaggaagaaaactggctgctatctttatagttccactgccctaaccaagtgtccacattctaaatgtgtagtgtccatcccttatgtaatagtggtttcccgcccaaagtgagactttccttttaattggagaagggtatagaggtagtccaggtgggaacgccagaagtgctgattgcccagccattgggaccacctgttcttgccccactaccctctagtgggaggccaaagtaaaggctggctggtgggtgtctgtggattgaggatgtggcagggactggtcctcccacctccctctggccaaagatgggctttgcccgctgtgtgcctgtcaccacccaccagcagtcatgccctgggcttcccaaatggagaggtagcaggcaacgtttttaaaaagaaagaaaacaggaaactgtattgtgtcgggggaggcgggagggagatgaggaaacggtttggattttgtgtgtgggagggtattttttgggggtagttgtctgtaactttcctaagtgctttttttccttttcttttttaaagtaagttgcaggctttggcttggaaaaccccagggggatggggggcagaaacctgaggctgctgcccctttatctgccttcacggtactgtccccttcccccagctcctccctgaccccatgggccaggcctcagaccttccagctaaccgcttcccatgagccactactctgatgtcagcctataaccaaaggagctggggggtccaggcctggtgaccaacctttctcagcccactcaatcagggtgctccccacctgcaggcaggaggcaacaccctatctgctaccatcagccccttccagagcccatctgccccgcccagccctgccctgcccagccataccctgctctgccccatctgggggtgccctgctcagggatgggctggcagggctgtacccagcctccctggtaagcagagactcaagaaacctctggggtcctgttttctggtcgtgtgatcccaggggtgcacatgggccccttgggtgtctgaacagaagggcatgggagggagggctgcacccctgcagtcttactctgctggtgtagcgggcagctgcccactcccaccccaccctgcaccgcgggctcctgagtcggcagattaagcattttataaattgtattttaaatacatgttttaaacttgtcagat

SEQ ID NO: 477 - DNA, 1268 bp, Artificial Sequence
  GBA3
gggtgagagctcattttctgtttgcacaattgcctggctcctctggccaaagggtgctctgcttctggcagctgaagatcccagtagacagcttcttaaaccatggctttccctgcaggatttggatgggcggcagccactgcagcttatcaagtagaaggaggctgggatgcagatggaaaaggcccttgtgtctgggacacatttactcatcagggaggagagagagttttcaagaaccagactggcgatgtagcttgtggcagctacactctgtgggaggaagatttgaaatgtatcaaacagcttggattgactcattaccgcttctctctttcctggtcacgtctgttacctgatgggacgacaggtttcatcaaccagaaagctatccaacttgataaagtcaatcttcaagtatattgtgcatggtctcttctggataactttgagtggaaccagggatacagcagccggtttggtctcttccacgttgattttgaagacccagctagaccccgagtcccttacacatcggccaaggaatatgccaagatcatccgaaacaatggccttgaagcacatctgtaggcaagatggctgagaaatacaggagaggcgtctgcttttggaaaggaaatctgctttggtgatgatctttcaggcaatctcaacttacttctttaatcaacatttaatatcaatggatctgtgattaaatgtctgaatatgtaatgcctcgtgaagtatttaataatggcctttatttgtatttggatcaatgaggtttttaaaaaaaatggaagagaaaaccactaaccttgatttttgtattgcaaaatcagatagacctggaaacataaatttaaatccttagacatttttctagaaaaaaatgcaaagtttataaagatgatacaaccatgatttgcaactgtaacaggagaccatttattataagcgtacctgtttgtgaacttaattattctgattccataagctgtttttgcttaggtgatccactgccatgtgatccataatttttctacataaaaaatcaaagttaaaagtcacattatacagttatgcattcatttcaacaaaatagtgaattgataatctacttgttaatatattcggcccatattttgtgtgtttggacaagtacatctcccttttgcctaatgaacttttgaaaaataataaaataatagaataaattagactttgaatggcagaaaaaaaaaaaaaaaaaaaaaaaaaaaaaa

SEQ ID NO: 478 - DNA, 18103 bp, Artificial Sequence
  DST
ctccagccccgccgtcgagtcgccctcgcctcgcccgcaccatgatcgccgcggctttcctcgtcttgctgagaccctacagcatccaatgtgccctcttcctcttgttgcttctgctgggcaccatcgccaccatcgtcttcttctgctgctggcaccgcaagctccagaaagggaggcatccgatgaaatcggtcttctcgggtcgttcaagaagccgagatgctgttttgagatcgcaccactttcgttctgagggattcagagcaagccctcggcatcttagaagacgagttgcagcggccgcagctgcccgtctggaagaagtgaagcccgtggtggaagttcaccatcagagtgagcaagaaacttcagtgaggaaacgaagaatcaagaagagcagccgagtccagccagaattttatcactctgttcaaggtgcttcaatcaggaggcctagttccgggaacgcgtcctatcgctgctctatgtcttcctctgcggatttttccgatgaggatgatttcagccagaaatctggctccgcatccccagctccgggagacaccttaccctggaatttgcctaaacatgagagatcgaaaagaaagattcaagggggctcagtgctggaccctgccgagagggcagtgcttcggatagcagatgaacgggacaaagttcagaagaaaacatttacaaaatggataaatcagcatctcatgaaggttcgaaaacatgtgaatgatctctatgaagacttaagggatggacacaatttgatttctcttttagaggttctttcaggagataccttgcccagagaaaaaggtcggatgcgttttcacagactacagaatgtacaaattgcacttgactatttgaaaagacgccaggtgaaattagtgaatattagaaatgatgacataacagatggaaatcccaaattgactttgggattaatctggacaataattttgcactttcagatatctgatatccatgttactggagagtcagaggatatgtctgcaaaagagagattgctactctggacgcagcaggcaacagagggttatgctggaattcggtgtgaaaatttcactacctgctggagagatggaaaattatttaatgccatcattcataaatacaggccggacctgatagatatgaatactgttgctgttcaaagcaaccttgcaaatttagagcatgctttttacgtagcagaaaaaattggtgttataagacttctggaccctgaagatgtcgatgtctcctcacctgatgaaaaatcagtaataacttacgtgtcatctctctatgatgcatttcctaaagtccctgaaggtggggaaggcattggtgcaaatgatgttgaagtcaaatggattgaataccagaatatggtgaactacctcatccaatggattagacaccatgtgaccacaatgtctgagagaacatttcctaataatcctgtagaactgaaggcactttataatcagtatttacagtttaaagaaacagaaattccaccaaaggagacagaaaaatcaaaaattaaacgtctatataaattattagagatttggatagaatttggacgcatcaagctccttcaaggttatcatccaaatgacatagaaaaagagtgggggaaactcattattgccatgctagagagagagaaggcccttcgtccagaagtagaaaggttagaaatgttgcaacagattgccaacagagttcagagggacagtgtcatctgtgaagacaaactgattcttgctggaaatgctcttcagtctgattctaaaagattagaatcaggagtgcagtttcagaatgaagcagaaattgctgggtatatacttgaatgtgagaaccttttacgccagcatgtaattgatgtacagattcttattgatggaaaatactaccaggcagatcaattggtacagagggttgcaaaactgcgtgacgaaattatggccttaaggaacgaatgttcttctgtgtacagcaaaggacgcatactgacaacagaacagacaaagctcatgatatcaggaatcactcaaagtttaaactcaggatttgcacagaccttacaccctagtctgacctcagggctgacccagagtttaacaccttccctaacctcttctagtatgacttctggcctgtcatcagggatgacttcccgcctgactccatctgtcactccagcttatacacctggtttcccatcaggattagttccaaatttcagttcaggagtagagccaaattcattgcaaactttgaagttgatgcagatccgaaaaccccttctaaagtcttctttgctggatcaaaatttaacagaagaagaaatcaatatgaaatttgttcaggatcttttgaattgggttgatgagatgcaggtacaactggaccgcactgagtggggctcagatttgccaagtgttgaaagccatttagaaaatcataaaaatgttcatagagctattgaagaatttgaatctagtctcaaagaagctaaaatcagtgagattcaaatgacagcacctcttaaactgacttatgcagaaaagttgcacagattagagagtcagtatgcaaaactcttgaatacatccaggaatcaagaacggcaccttgatacactccataattttgtaagtcgtgcgactaatgaacttatttggttgaatgaaaaagaagaggaggaagttgcttatgactggagtgagagaaacaccaacatagctaggaaaaaagattatcatgctgaattaatgagagaacttgatcaaaaggaagaaaatattaaatcagttcaggagatagcagagcagctacttctagaaaatcatccagcccggttaactattgaggcctacagagcggcaatgcagacgcagtggagctggatcttacagctctgccagtgtgtggagcagcacataaaggagaacacagcgtatttcgagtttttcaatgatgccaaagaagctactgattacttaaggaatctaaaagatgccattcagcggaagtacagctgtgatagatcaagcagcattcacaagctagaagaccttgttcaggaatcaatggaagagaaagaagaacttctgcagtacaaaagcactatagcaaacctaatgggaaaagcaaaaacaataattcaactgaagccaaggaattctgactgtccactcaaaacttctattccgatcaaagctatctgtgactacagacaaattgagataaccatttacaaagacgatgaatgtgttttggcgaataactctcatcgtgctaaatggaaggtcattagtcctactgggaatgaggctatggtcccatctgtgtgcttcaccgttcctccaccaaacaaagaagcggtggaccttgccaacagaattgagcaacagtatcagaatgtcctgactctttggcatgagtctcacataaacatgaagagtgtagtatcctggcattatctcatcaatgaaattgatagaattcgagctagcaatgtggcttcaataaagacaatgctacctggtgaacatcagcaagttctaagtaatctacaatctcgttttgaagattttctggaagatagccaggaatcccaagtcttttcaggctcagatataacacaactggaaaaggaggttaatgtatgtaagcagtattatcaagaacttcttaaatctgcagaaagagaggagcaagaggaatcagtttataatctctacatctctgaagttcgaaacattagacttcggttagagaactgtgaagatcggctgattagacagattcgaactcccctggaaagagatgatttgcatgaaagtgtgttcagaatcacagaacaggagaaactaaagaaagagctggaacgacttaaagatgatttgggaacaatcacaaataagtgtgaggagtttttcagtcaagcagcagcctcttcatcagtccctaccctacgatcagagcttaatgtggtccttcagaacatgaaccaagtctattctatgtcttccacttacatagataagttgaaaactgttaacttggtgttaaaaaacactcaagctgcagaagccctcgtaaaactctatgaaactaaactgtgtgaagaagaagcagttatagctgacaagaataatattgagaatctaataagtactttaaagcaatggagatctgaagtagatgaaaagagacaggtattccatgccttagaggatgagttgcagaaagctaaagccatcagtgatgaaatgtttaaaacgtataaagaacgggaccttgattttgactggcacaaagaaaaagcagatcaattagttgaaaggtggcaaaatgttcatgtgcagattgacaacaggttacgggacttagagggcattggcaaatcactgaagtactacagagacacttaccatcctttagatgattggatccagcaggttgaaactactcagagaaagattcaggaaaatcagcctgaaaatagtaaaaccctagccacacagttgaatcaacagaagatgctggtgtccgaaatagaaatgaaacagagcaaaatggacgagtgtcaaaaatatgcagaacagtactcagctacagtgaaggactatgaattacaaacaatgacctaccgggccatggtagattcacaacaaaaatctccagtgaaacgccgaagaatgcagagttcagcagatctcattattcaagagttcatggacctaaggactcgatatactgccctggtcactctcatgacacaatatattaaatttgctggtgattcattgaagaggctggaagaggaggagaagtcactggaagaagaaaagaaagaacatgttgaaaaagccaaagaattgcaaaaatgggtatcaaatatcagcaagacattgaaagatgcagagaaggctggaaaacctcccttctctaagcaaaagatttccagtgaggaaatatcaaccaagaaggaacaattatcggaagcacttcaaactatacagctttttttggcaaaacatggagacaaaatgacagatgaagaaagaaatgaattggaaaaacaagtgaaaactcttcaggaaagttataatttattattcagtgaatctctgaaacagctacaagaatcacaaacctcaggagatgtaaaggtagaggagaagattgtagcagagcgtcagcaggagtataaagagaaactccaagggatatgtgatcttcttacccaaactgaaaaccgcctaattggtcaccaagaagccttcatgattggagatggcacagttgagttaaagaaatatcagtccaagcaagaggaattacagaaagatatgcaaggaagtgcacaggcattggctgaagtagtgaaaaacacagagaacttcttaaaagagaatggtgaaaagctgtcacaggaagataaggctttgattgaacagaaacttaatgaagctaagataaagtgtgaacagcttaatttaaaagcagaacagtctaaaaaggagctggataaagttgtgacaacagcaatcaaggaagaaactgaaaaggtagcagcagtgaagcagctggaagagagcaaaaccaaaatagaaaaccttttggactggttgtcaaatgttgacaaagactcagaaagggcagggacaaaacacaaacaggtaatcgaacagaacgggacccattttcaagaaggtgatggcaagtcagcaattggagaagaggatgaagttaatggtaacctgttggagactgatgttgatgggcaagttggaaccactcaggagaatctgaatcagcaatatcagaaagttaaggcccaacacgagaagatcatctctcagcaccaagcagtgatcatagccactcagtctgcacaagtgttgcttgagaaacagggtcagtatctctctcctgaagaaaaagagaaactgcaaaagaacatgaaggaactgaaagtgcattatgaaactgcactggctgagtcagagaagaaaatgaagttaactcactctctgcaggaagaattagaaaagtttgatgctgactataccgagtttgagcactggctacagcagtcagaacaagaacttgaaaacctggaggcaggtgcagatgacatcaatggtttaatgaccaaattgaagaggcagaagagtttctcagaagacgttatttctcacaaaggtgacttgagatacatcacaatttctggaaacagagtgttggaagctgccaaatcttgcagcaagagagacggtggcaaggttgatacttctgcaacccacagagaagtgcagcgcaagttggatcatgctactgatcggttcaggtctctctactctaagtgcaatgttcttggaaataatcttaaagatctggtggataaatatcaacactatgaagatgcttcatgtggacttcttgctggactccaggcctgtgaggccacagcgagcaaacacttatctgaacctattgcggtggaccccaaaaatcttcaaaggcaattagaagagaccaaggctttgcaaggacagatatcaagtcagcaggttgctgtagagaaactgaagaaaacggctgaagtgcttttagatgccaggggatctttacttccagccaagaatgatatccagaaaacacttgatgacattgttgggagatatgaggatctgtccaagtctgttaatgaacgaaatgaaaaactccagataaccttgacccgttcactgagtgtgcaggatggcttggatgaaatgctggactggatgggaaatgtggaaagttctctgaaagaacaaggtcaagtgcctttaaactctactgctcttcaggatattatcagtaaaaacattatgttggaacaggatattgcaggtcgtcagagcagtataaatgccatgaatgaaaaagtgaagaaatttatggaaacaacagatccatccactgcatcctcactgcaagccaaaatgaaagacttgtctgctcggttttcagaagcaagtcataaacacaaagaaactcttgccaaaatggaggagctaaaaaccaaagtagaactgtttgagaacctctcagaaaagctccagacatttttagaaacaaaaactcaggctcttactgaagtagatgtgccaggaaaagatgttactgaattgtctcagtatatgcaggaatcaacttctgaatttttagaacacaagaaacatcttgaagttttgcatagtctcttgaaggagatatccagccatggcttaccaagtgataaggctttggtccttgaaaaaacaaataatttgtcaaagaaattcaaggaaatggaggataccatcaaagaaaaaaaagaagctgtaacttcttgtcaagaacagttggatgctttccaagttcttgttaaatcattgaagtcatggataaaagaaacaacaaaaaaagttcccattgtacagccttcttttggtgcagaggatttaggaaaatctttggaagacactaagaaattacaagaaaagtggagtttaaaaacaccagagattcagaaagtaaacaacagtgggatctcactatgtaacttaataagtgctgtgaccacccctgcaaaggcaatagcagcagttaaatcaggtggagcagtattaaatggtgaaggaacagccacaaatactgaggaattttgggcaaataaaggtttaacatccattaaaaaggacatgactgacataagtcatggttatgaagatcttggcctcttactcaaggacaaaatagcggaactgaacactaaactctccaaattgcaaaaggctcaggaagaatcaagtgcaatgatgcagtggttacagaaaatgaacaaaactgcaacaaaatggcagcagacacctgcacctacagatactgaagctgtgaagactcaagttgagcagaataagtcgtttgaggcagaactgaagcagaatgtaaacaaagtacaggagttgaaagacaaattgacagagctgttggaggagaacccagatactcctgaggcccccagatggaaacagatgttgacagaaatagattctaagtggcaagaactcaatcaattaacaattgatagacaacaaaaactggaagaatcctccaataatctaacccagttccagactgtagaggcccaattgaaacagtggcttgtggaaaaagaacttatggtcagtgttcttgggcccttgtcaattgacccaaatatgctaaacacacaaaggcagcaggtgcagattttgctgcaagaattcgccactcggaaacctcaatatgaacagctgacagcagctggtcagggcattctgagcaggcctggagaagacccttctttacgtgggattgtgaaagagcaactggcagctgtgacccaaaaatgggatagcctaacagggcaattgagtgacagatgtgactggattgaccaagccattgttaaaagcacacagtatcaaagcctgctgagaagcctttctgataaactgagtgacttggataataaactcagcagcagtctggctgtgagcacgcaccctgatgctatgaaccaacagttggaaacagcccaaaaaatgaagcaggagatacagcaggaaaagaagcagataaaagtggcccaggcactctgtgaggatttgtcagcactggttaaagaagagtacttgaaagcagaacttagtaggcaactagaaggcatcttaaaatcatttaaggatgttgaacagaaagcagagaatcatgtccagcaccttcagtcggcctgtgcaagctctcatcaatttcagcaaatgtctagagattttcaggcttggctggatacaaagaaagaagagcaaaacaaatctcatccaatatctgccaaactcgatgtcttggagtcattaattaaagatcataaagactttagtaaaactttgaccgctcagtctcatatgtatgaaaaaaccattgcagaaggtgaaaatctgttattaaaaacacaagggtctgagaaggcagccttacagttacagcttaatacaattaaaaccaattgggatacatttaataagcaggtgaaagaaagagaaaacaagttaaaagagtcattggaaaaagcccttaagtataaagagcaagtagagactctctggccatggatagacaaatgccaaaacaacctggaggaaataaaattttgcttggatcctgctgaaggagagaattctattgccaagttaaagtctctgcagaaggaaatggaccaacactttggtatggtagaattactgaacaacacagccaatagcttgctcagtgtctgtgagatagataaagaagttgttacagatgagaataagtcactgatccagaaggtggacatggtcactgaacaacttcacagtaagaaattctgtctggagaacatgactcagaagtttaaagaatttcaagaagtttccaaagaatctaaaaggcagcttcagtgtgcaaaggagcagctagatatccatgattcgctgggatcccaggcttacagtaacaaatacctgaccatgttgcaaactcagcagaaatcacttcaggccttgaagcatcaggtagatttggctaaaagacttgcacaggaccttgtggtagaggcctcagactcaaagggaacctctgatgttttattacaagtggaaaccatagctcaagagcatagtacactaagtcagcaggttgatgaaaagtgttctttcttagaaaccaagcttcagggcattgggcatttccagaataccattcgagaaatgttttctcagttcgcagagtttgatgatgaactggatagcatggctccagtggggagagatgcagaaacattgcaaaagcaaaaggaaactataaaagcctttctaaagaaactagaagccctcatggcaagcaatgacaatgccaataaaacctgcaagatgatgttagccacagaagaaacctctcctgaccttgttggaatcaaaagggacttggaggccttaagcaaacaatgcaacaagttactggaccgagcccaagccagagaagagcaggttgaagggacaattaagcgccttgaagaattttacagcaaattgaaagaattttctattctgctccagaaagccgaagaacatgaagagtcacaaggtcctgttggtatggaaacggagacaattaatcagcagcttaacatgttcaaggtattccagaaagaagagattgaacccttgcaaggtaaacagcaagatgtaaactggttaggtcaaggccttattcagagtgctgccaaaagcactagcactcagggcttggagcatgacctggatgatgtcaatgcacggtggaagactctcaataagaaggtggctcagcgagcagcccagctgcaggaggccttgctgcactgtgggaggttccaggatgccctggagtccctgctcagctggatggtggacactgaggagcttgtggccaatcagaagcccccgtcggctgagttcaaagtggtaaaggcccagatacaagaacaaaagcttctccagagattgttggatgaccgaaaatctacggtggaggtaatcaaacgagaaggagaaaaaattgctacaacagcagagcccgcagataaagtgaagattttgaaacagctcagtctcttggatagcagatgggaggcattgcttaataaagctgaaacaaggaatcgtcagttggaaggtatctcggtggtagcacagcaatttcatgaaaccttagaaccactgaacgagtggcttacaaccatagaaaagaggctggtgaattgtgaacccataggaacccaagcatctaaacttgaggaacaaattgcacagcacaaagccttagaagatgacatcatcaatcacaataaacatttacaccaggctgttagcattggccagtccttaaaggttttgagctccagggaggataaagatatggtgcagagtaaattagacttctctcaagtatggtacattgagattcaagagaaaagtcacagcaggtctgagctcctccagcaggccttatgtaatgctaagatttttggggaagatgaagttgaactgatgaactggctgaatgaagtgcatgacaaactgagcaagctctcagtccaggattacagcactgaggggctatggaagcagcagtctgaacttcgggttctgcaagaggacatcttactcaggaaacaaaatgtagatcaggctttactaaatggtttagaactacttaaacaaaccacaggtgatgaagttttaataattcaagataaattggaagccattaaagcaaggtacaaagacattactaaactgagcactgatgtggccaagactctggaacaggcgctgcagcttgcaaggcggctgcactccacacacgaagagctgtgtacctggctggacaaagtggaggtggaattactttcatatgaaactcaggttctgaaaggagaagaagcaagtcaagcacaaatgagaccaaaggaactgaaaaaggaagctaagaacaacaaagccttactggactcccttaatgaagtgagcagtgctttgctggaactggtaccatggagggcaagagaaggacttgagaaaatggtagctgaggacaatgagcgctaccgattagtgagcgacaccatcactcagaaggtggaggagatcgatgcagccattctgcgatcacagcagtttgaccaagcagctgatgctgagttatcctggattactgaaacagaaaaaaaattgatgtctctgggtgacatcaggcttgagcaagaccagacttctgctcagcttcaagttcaaaagacattcaccatggagattttgagacacaaggatattattgatgaccttgttaaatctgggcataaaatcatgaccgcatgcagtgaagaggaaaagcaatcaatgaagaaaaaactggacaaggtactgaagaactatgataccatctgccagattaattcagaaaggtatctgcagctggaacgggcacagtccctggttaaccaattctgggaaacatatgaagaactttggccatggctgacagaaacacaatcaatcatctctcagcttcccgccccagcccttgaatatgaaactctaaggcagcagcaggaagaacatcggcaactgcgtgagttgatagctgaacacaagcctcatatagataagatgaacaaaactgggccacagttactggaattgagccctggggaaggcttttctatccaagagaagtatgtggcagccgacaccctttacagtcaaattaaagaagatgtcaaaaagcgtgctgtggcactggatgaagccatttctcaatcaactcagttccatgacaagatagatcagatccttgagagcctggaacgcatcgtggaacgtctgaggcagccaccctctatctctgcagaggttgagaagatcaaggaacagatcagtgaaaataagaatgtgtcagtagacatggaaaagctacagccgttgtatgaaactcttaaacagaggggagaggaaatgattgctagatctggggggactgataaagacatatctgccaaagctgttcaggataagcttgaccaaatggttttcatttgggagaacatacacacactggtggaagagagggaagccaaactactggatgtgatggagctagcagaaaagttctggtgtgatcacatgtcattgatagttaccattaaagatactcaagatttcatccgggacctggaagatcctggaattgatccttcagtagtaaaacaacagcaagaagcagcagagaccataagggaagaaatagatggactacaggaggagctggatatagttattaacctaggttctgaactcattgcggcatgtggggagcctgataaacccattgtcaagaagagtatagatgagttaaattcagcatgggattctctaaataaagcttggaaagaccggattgacaaacttgaggaggcaatgcaggctgccgttcagtaccaggatggactgcaggcggtatttgactgggtagatattgcaggtggtaaattagcttcaatgtctccaattggaacagatctcgaaactgtcaagcagcagattgaagagctaaagcaatttaagtctgaggcctatcaacagcagatagaaatggaaagactgaatcatcaagcagagcttttgctaaagaaagtaacagaagagagtgacaaacacactgttcaagacccattaatggaactgaaattgatatgggatagcctggaggagagaatcatcaacagacagcataaactggagggtgctctattagccttgggtcagttccaacatgccctggatgagctcctggcatggctgacacacaccgagggcttgctaagtgagcagaaacctgttggaggagaccctaaagccattgaaattgaacttgccaagcatcatgtgctccaaaatgatgtattagcccatcagtccacagtggaagccgttaataaagcaggaaatgatctaattgaatcaagtgcaggagaagaagcaagcaaccttcagaacaagctagaggttttaaatcaacgctggcaaaatgttttggaaaaaacagaacaaaggaagcagcagctggatggtgccttgcgccaggccaaagggttccatggcgaaattgaggatttgcagcagtggctgactgacacggagcgtcatctgttggcatctaaaccgctgggaggtttaccggaaacagccaaggagcagcttaatgtccatatggaagtctgtgctgcctttgaagctaaagaagaaacatataagagtctgatgcagaaaggccagcagatgcttgcaagatgcccaaaatctgcagagacaaatattgaccaagacataaataacttgaaagaaaaatgggaatcggtggaaaccaaactcaatgaaaggaaaactaaactggaagaggctctcaacttggcaatggagttccacaattctctccaagacttcatcaactggcttactcaggctgaacagaccctaaatgtagcttctcggccaagtctcatcttggacacagtcttatttcaaattgacgaacacaaggtttttgccaatgaagtaaattctcatcgtgagcagataatagagctggacaaaactggaacccacctaaaatattttagtcagaaacaagatgttgttctaatcaagaatctacttatcagtgtacaaagtcgatgggaaaaagtggttcaacggttggtagagagaggaagatctttggatgatgcaaggaagagagccaagcagttccatgaagcttggagtaaacttatggagtggctagaagagtcagaaaagtctttggattctgaactggaaatcgcaaatgatccagacaaaataaaaacacaacttgcacaacataaggagtttcagaaatcactcggagccaagcattctgtctacgacaccaccaacaggactggacgttctctgaaggagaaaacctccctggctgatgacaacctgaaactggatgacatgctgagtgaactcagagacaaatgggataccatatgtggaaaatctgtggaaagacaaaacaaattggaggaagccctgttattttctggacaattcacagatgccctacaggctctcattgattggttatatagagttgaaccccagctggcagaagaccagcctgttcatggagacattgatttggtgatgaatctgatcgataatcacaaggccttccaaaaagagttggggaagaggaccagcagtgtgcaggccctgaagcgctcagcccgagaactcatagaaggcagtcgggatgactcctcctgggtcaaggtccagatgcaggaattaagcacacgctgggagaccgtgtgtgcactttctatatcaaagcaaacacggttagaagcagccctgcgtcaggcagaggaattccactcggtggtacatgccctcttggagtggctggctgaggcggagcaaaccctgcgtttccatggtgtcctcccagatgatgaggatgctctccggactctcattgatcagcataaagaattcatgaagaaactggaagaaaagagagctgaactaaataaagccaccactatgggcgacaccgttttggctatctgccaccccgactccatcactaccattaagcactggataacaatcatccgggcgaggtttgaggaggtgctggcctgggcaaagcaacatcagcagagattagcaagtgctctggctgggcttattgccaaacaggaattgttggaagctttgctggcttggttgcaatgggctgaaactacacttactgataaggataaagaagtcatcccccaggagatcgaagaggtgaaagcactcattgcagaacaccagaccttcatggaggaaatgaccagaaaacagcctgatgttgataaagtaacgaagacctataagaggagagctgctgatccttcctcattacaatcccatattccagtcttggataagggacgagcaggaagaaaacgctttccagcatcaagcttgtatccctctgggtcacagacacaaattgaaaccaaaaatcctagggtaaacttactggtgagcaaatggcagcaagtctggctcctggcgttggaaagaaggaggaaactcaatgatgccttggacagactagaggagctgagggaatttgctaactttgattttgatatctggcgcaaaaaatacatgcgatggatgaatcacaagaaatctcgagtgatggacttcttcaggagaattgataaagaccaggatgggaaaataacgcggcaggaatttattgatggaattctttcctcaaagtttccaaccagtcgcttggagatgagcgcagttgcagacatctttgacagagatggcgatggatatattgactactatgaatttgtagcagcccttcacccaaataaagatgcatataaacctatcacagatgccgacaaaatcgaagatgaggtgacaaggcaggtagctaagtgtaaatgtgcaaagcgatttcaagttgagcagattggtgataataaatacaggttcttcctgggaaatcagtttggagactcccagcaactgcgactggtccggatcctgcggagtactgtgatggttcgtgttggaggtggatggatggcacttgatgagttcttagtgaaaaatgatccttgcagggccaaaggaaggacaaacatggaactgcgtgagaagttcattttagcagatggtgccagccagggtatggctgctttccgaccccgaggccgaagatcccggccatcatcacgaggcgcttcacccaacagatccacttctgtgtccagtcaggctgcgcaggcggcctccccacaggtccctgccaccaccacacccaagattctccatcctttaacacgcaattatggtaaaccatggttgacaaacagcaaaatgtcaactccttgtaaagcagcagagtgctcagactttcccgtgccatctgcagagggaacgccaatacaaggaagcaagcttcgacttccaggatatttatcagggaaaggcttccactctggggaggacagtggcttgataacaactgcagctgccagagtccgaacacagtttgctgattccaagaagactcccagccgaccaggaagtcgagctggaagcaaagctggcagcagggccagcagccgccgaggcagtgatgcatcagactttgacatttcagaaatccagtccgtgtgctcagatgtggaaactgtcccccagacacacagacctacaccccgagcaggttctcggccatccacagcgaagccttcaaaaatccccacgccccagaggaaatcacctgccagcaaattggacaagtcctcaaagagatagtgcaattggttctaccaaggcccttccttgagcatttattatttaagtttgaacgatgtaaaatatggtgtagaaattcttgtgaaatattgcaagaggcgagtttaaaattctgcagatggccttatttgtgtatttgtctttttattttatctgtataattttttttgtcagatattctggggttaaagtcacatcatatgtgaggaggaaaagtttaacatgaactaacatttctgcactgtaacgtgccgggcacacactaaactcagttactgtacctacaggtaagtctacatcctctctgacagccacagcactacatcaatccctgacgttagggatacctcatgacattttcctgtttttatggaaactctgagaagctgaatgatacatgcaggggatattttttgagatgatttaaatgtaaaccaaaagatggaagacaaaaagacaaacacacccacacgcagtctttgcagtatctgacagagaactcacaggaagttacttcaagcacttgccagtactatgatattcaagtaccttgcagcatttctctgccattgctttcaatgaggccagaggcatcctggatattagacctattatactgtaagaatataagtataaagtgcgttcatatacatgtgaggttttcttttgcttgagtggacagtagcacctgtatcattgaactcattttgtatcagagcaattttgcttgcagaaagctatgaaataaaacacgtcccttaactgcattgctatggaattaattttttttccccagggaaaactagtgtatttttttatgagcaatatcaatttggagtgaccaaaagatacttaaaaatgggtttattttgatttctcatctgaaataatcatgttctggtattatatctatctatatttaataaatatatacattttaatttattatgtgtactcacatactatagaaagatattagtatgcatttaataaaacatattcacttgaatatatggaaaaaaaaaaaaaaaaaa

SEQ ID NO: 479 - DNA, 7650 bp, Artificial Sequence
  DNM3
gctgcgggtcgttagctgtcagagccaagcggcgggctggcggcgggctccgacgtctgcgccaggacctggctggctgagcccggcgcagcagcagcagccagggcagcgcggcccctactccctgtcaggtcgtagaggcgagcagggaccagctggtcgccggcccctcgggcaagatggggaaccgggagatggaggagctgatcccgctggtgaaccgtctgcaggacgcgttttcggcgctgggacagagctgcctgctggagctgccgcagatcgccgtggtgggcggccagagcgccggcaagagctcggtgctcgagaacttcgtgggcagggactttctccctcgagggtcgggcattgtaacaagacgacctcttgtgctgcagcttgttacttctaaagcagaatatgccgagtttctacattgcaaaggaaagaaatttacagattttgatgaagttcgccttgagattgaagcagaaacagatcgcgtgactggaatgaataaaggcatttcctccatacccattaatttacgagtctattccccacacgtgttaaatctaacccttattgatctacctggaataactaaagtgcctgtgggagatcagccaccagatatcgagtatcagatcagagaaatgattatgcagttcatcacgagggagaactgtctgattttagctgttactccagccaacactgatcttgcaaactcagatgcgctgaagctagctaaagaagttgatcctcaaggtctgagaaccattggagttatcaccaaactggaccttatggatgaaggaacggatgccagggatgttctagagaacaaactgttgcctcttcgcaggggttacgtgggggtggtaaacagaagccagaaggacatagatgggaagaaggacataaaggcagccatgctggcagagaggaagtttttcctttcccacccggcttacagacatatcgctgaccgaatgggaaccccacacctgcagaaggtccttaatcagcaacttaccaaccacattcgggataccctaccaaacttcaggaacaaactacagggacagttgctctccatagaacatgaagtagaagcctacaaaaatttcaaaccagaagacccaacaaggaagaccaaagcattgctgcagatggttcagcaatttgctgtggactttgagaagagaattgaagggtcaggggatcaagtagataccctggaactctcaggtggtgctaaaatcaatcgtatttttcatgaacgctttccttttgagatagtaaagatggagttcaatgagaaagaattgcgaagagaaataagctatgcaatcaaaaacatacatggtatcaggacagggttgtttactccagacatggcatttgaagcgatagtcaagaaacagattgtaaagttgaaagggccttccttgaagagtgtggatctggtaatacaagaattaatcaacactgtgaagaagtgtaccaaaaaactggcaaacttccccagactctgcgaggaaacggaaaggattgttgctaaccacattcgtgagcgagaagggaagacaaaggaccaggtattgctattgattgacattcaagtctcttacatcaacaccaaccatgaagacttcattggcttcgcaaatgctcagcagaggagcagtcaggttcacaagaaaaccacagttggaaatcaggtgattcgcaaggggtggctcaccatcagcaacattggcatcatgaaaggcggctcgaagggatactggttcgtccttactgcggaaagcttgtcctggtataaagatgatgaggaaaaagaaaagaagtacatgcttcccttggacaacctgaaagttcgggatgtggaaaagagctttatgtctagcaagcacatctttgcactctttaatacagagcaaaggaatgtatacaaagactatcgcttccttgagctggcatgtgattcccaggaggatgtcgacagctggaaggcatctctactaagagctggggtctatcctgacaaatctgtagctgaaaatgatgagaatggacaagcagaaaacttttccatggacccacaattggagaggcaagtggagaccattcgcaacctcgtagactcctacatgtccattatcaacaaatgtatccgagatctaattccaaaaacaataatgcaccttatgatcaataacgttaaagatttcataaattccgagctcctagcacagttgtattcttcagaggaccaaaataccctgatggaggaatctgctgagcaggctcagcgccgggatgagatgcttcgaatgtatcaagcactgaaagaagcccttgggataattggggacatcagcacagccaccgtgtccactccggcaccccctccagtggatgactcctggatacagcactctcgcaggtcacctcctccaagccccacaacccaaaggaggccaacactaagtgctcccctcgcaaggcccacatccggccgaggaccagctcctgccattccctctcctggcccccactctggggctcctccagtcccattccgtccaggcccattacctcctttccccagcagcagtgactccttcggagcccctccacaagttccatctaggcctacgagggccccgcccagtgtcccaagccggagaccacccccatcaccaactcgtcccactataatccgcccactagaatcctccctgttagactaaacgaagtgtctggcatggcaattaatcactaatgaattatgcgaaagcaacatatttgataaccgttgcagtaaatcatgagtagtcgcatgtgtggacatcagtaggcaagtaaccagttttactaatgcattcatcgctcatcttcattgctcatggtatgtcaaacctttggggtttgactcagaaactgctaaccttttagaggctttatatgttgtactgaccaaggtaggtttgtatagcagccctatactttggggatcatttgcctaccatggcatatatttgaaattgctttggacaagttttctaggctatctaccaggtagctcattaaacgtaattcttcagatatgagatagtgggcttagacctaagccatacatatttcttttcccacattctgtttaggatgacagtaattctgttgtctaccattaatgctactacctactccataattgcctatttagctcctcttttcttcctttttatttcataagactgctaggaagtgattttttaaaattaggactccttaagaataaacttttccagaagcacgaggtagtttgcaaaggaaaagtctgcactgtttgctctaaagagcttctcctcattccaatgtgttttgcttcatgctagaagcatatgcaacagtgaataaaagcttctttttttgttaatcagtcaataaatttggctaattagtttcagagttcaaggaagaagcaaaatatcacatctctagaagtgttgggaaaaatataatttctttctttacttatattcacctcatggtaggttatattgaaggctgacatggagaatgtttacttttctatttggcatagctaactacactttgatactaactccagttttactattattattttggttggaaaaaaaattcactctttacgtgctaatttgtaatcttgttttgtaagaatttatcctacccttgaaacaggctcagtgtaactgtatatccattctaggctttcttaataaatcttgaggctatgggataatcacatttaaagaatggttcctgaaatgaagtcagtagaaatggcatgggataagagcagagctcacacttttacagttgcagtatttcaaagtccctatccaggtcactccagaaaagggtattgaaacgttgaaatctaaagcaaatttgcaatttcttaagatttctaaaatttaccagaacagtttagcctgggggttaatagttaagtcttgaggctaagttttggactaccaaggaccagatgattcacatgtaggaaacagccagaagccaactggaattttgtgtgctaactgttcccagacagcagagcaagtattcactgagtaggggtgtcccatgacactatttcatattctacagaagtaaatcaggtttcaccaactgaaatgtctccctttgaaagtagcaaacatgatttgtatgttaacttaactttaatttcctgtgtagtttacacccagagcagatactcataaagtataaagtaaaaacttttaaccattattaaacagagaacttgccatgttgagtgccattgtattgaacttattctaaaggcttatgctaacccatttataattggtaaaaatcagaaaatacaagatttacataaaggtcatttcaacttttaaggttaccagtgattgtataaaaacatcacaatcctaaatcctctcgtatctcaccccaaaccccaaactgggggaaaaaaagttaactctttgtgaatggaaccaatgtgcaagatacatactgcatttttaaaatagtgtctcagctaaatggaaaactgttaagcaaacatccatagtaaaacaaataatcttcagtgagatctttttataaaacttcttgtttttaggattccctttgcttcttcctttgaattctctaaaataggcagctaacggattatatacttcagggtttggctttgtgctaaatgtggttttgtgttttgctgtatttcaaaattttccttctgttaaaggaaaatattgtgaataaccactggtgtgttcttagatcagcacaaaccatgtcaaaaaaaattggagatttttttccaattttccttccactgatcttaggcagtaataaacaatggcatttgtcatctttggcacttgcttttagattatagtcccacagttgcactgccccaattgtctacctttgtgggtacatttttgttctttactcctaagttatttctcatagaacccagcctactctagaatttcagcagtgacattggagaatatttttaatttgctgcagtactatgtcatattattagtatgaatctcatttcccaaagggtttgtattctgctaaaaggagatgccaatgttgaatgaagtctgaaactctagtatgtgcatagtttgacgtgcagcatgcacaccaggccttaagatgggaatgtagcttaatgattttctgtttcccataccatttctaatcttttgtgtaattttctcttaactgattgctctgatattgtaaacacaatagatgtagctctatcatgtctagcataatttaaaaaatcagtgtttttaggatttgggaaaataaactgtaaatgtttatttgataggtaaatatagttttattgtcacatgctaaatattgcatgcatattgactaattggaataaccatttactcaattatggacagcttattgaaatagtattgatttagaaaaagtatattgcatttctaaaaaacatctaccaaggttactcgtctgaatattgcttttagccgtgttttataacatagacgagcagtagggtctgtttattagcaaatttcctatttgttccaatacaaactcactttattctaaagtatattaatgaaaccagttcctgtgatgtaactgtaagccttctcgacttagacttaaaaagtggtcacatagattaattttgtgactttttagtatagactgtagccataattctcaaatatgaaatgggacctaataccagtatgtgataaatgttgatgttttctgtgtacaaacacattttctatgcatgtgtctctgtgtatatggcatatacctagtaagtatgtttctgtaagtatgtgtattttatgtccatttgagtaggtaggtaggttttaaaaatactagttaaaatgccacaagcatgagtgtgattgtatgtgcactgtgtgtatatatataaatatatgtatatgtatggttgtaaatatctatgtatacatgtacttagtatgtgtggtatcaggatattttttaaactgtgataatacaacagatagctttgaatgatctgccataacatgtggtaacaatagttcatttctcataacatatatgaggtatacaaaattttctaactccagattgtagtcattttgagaggtacaaagctcataattaccatgacaacatggtaatgtccatagacatttgtatctgaatccacaagaagatctgaatctaagaaggaattacctttgacaatatttttcggtaagaagtaaaacctctggagacctatctttaagatctctaattggaattataaattatttttggattgctgagctgaatcttaaaaagccaagttgatatacatagtcatttttcctctatggtagaagtaaaaaaaaaaaaaaaggacatagcaacattaaagtagtggatttttctgagtaaatttgctgaaaatataagagagaagctatctaataccttggaggtaggtcatccactttttcaggtaaacatttttcatttggcaaatggcataattatttgaaagtgacaggaatctcctcagaatgaagaataaagcctactaggtctctaactgttgaactcatgaaagaagatagtgtatgagacttaagccatgagttttgtatcatttcaattagaagactactagctgtgagctcagagtttaatgtaaatgaatctagatgattttgaagaaatgattattcgttcaccagatcactcattgtacattctaaaaagctcaaatgagtcttctagatactcttactcatcctgtctggttgctatgtttaaaattatgtggtgctgtgtaggtgaaactttaagaatatttttgaagcatatgtaatatatgcactgctatttgtgtgtgtgtgtgtgtctttgtatatatgtaagaatgtgtgtatgtgtgagagcaagagagaggaaactcaaagaggagtgtttgtcttaagacctgttcatactggtatattggtgagacttctcacttctggttggaggtttcacatatggctcaactcaagtcattaatctctttttaatttttactcttgaattccttaaacttcgctcattatgaaatgttttaaaattatgacaaaaattactctgtctaaccacttgccttgtctgctaccagtttgttaaaaattattccccccaaccagtaattccaccagtactacttgatttgtgttatatttcctatgtacatgtacagcctttgttttgcttgcttgtctatttttactttcccttttttgggtcaaatttttcttttgctttgtttgaagaaggaatatacagaagtaaaatcttgtcttctctgctgattctttaattaatatgagccggatactttccactgtcttcttggcactttcaggatttcttaatgctgatatatggactcttagaatggaatttttgaagaaaaatctcaaagcctgtatcgttcttgaaggtcacatgtacctattgtgaaaatgtgaagctgtatttctgaagctgaaataaattataacatttgaaggaaaaaaaaaaaaaaaa

SEQ ID NO: 480 - DNA, 4926 bp, Artificial Sequence
  ACTN2
gacgggcggcgcggctattaagccgcgcggcagctgctcgcagccggagctggtgcttcgcccgagacccagcgcccaggcgtgtcgccccgagaggagccgcgcgaaggtcaccccgcgcccgccgcccgccgcccgccgcctccgtgggtccgtttgccagtcagcccgtgcgtccgagcccctcgcgccccgccgcagccccggccaaccgagcgccatgaaccagatagagcccggcgtgcagtacaactacgtgtacgacgaggatgagtacatgatccaggaggaggagtgggaccgcgacctgctcctggacccagcctgggagaagcagcagaggaagaccttcactgcctggtgtaactcccacctaaggaaagccggcacccagattgagaacatcgaggaagacttcaggaatggccttaagctcatgctgcttttggaagtcatctcaggggaaaggctgcccaaacctgaccggggaaaaatgcggttccacaaaattgctaatgtcaacaaagctttggattacatagccagcaaaggggtgaaactggtgtccatcggcgctgaagaaattgttgatggcaatgtgaaaatgaccctgggtatgatctggaccatcatccttcgctttgctattcaggatatttcggttgaagaaacatctgccaaagaaggtctgctgctttggtgtcagaggaaaactgctccttatagaaatgtgaacattcagaacttccatactagctggaaagatggccttggactctgtgccctcatccaccgacaccggcctgacctcattgactactcaaagcttaacaaggatgaccccataggaaatattaacctggccatggaaatcgctgagaagcacctggatattcctaaaatgttggatgctgaagacatcgtgaacacccctaaacccgatgaaagagccatcatgacgtacgtctcttgcttctaccacgcttttgcgggcgcggagcaggccgagacagcggctaacaggatatgtaaggttcttgctgtgaatcaagagaatgagaggctgatggaagaatatgagaggctagcgagtgagcttttggaatggattcgtcgcacgatcccctggctggagaaccggactcccgagaagaccatgcaagccatgcagaagaagctggaggacttccgggattaccgccggaagcacaagccacccaaggtgcaggagaaatgccagctggagatcaacttcaacacgctgcagaccaagctgcggatcagcaaccgtcctgccttcatgccctccgagggcaagatggtgtcggatattgctggtgcctggcagaggctggagcaggctgagaagggttacgaggagtggttgctcaatgagattcggagactggagcgcttggaacacctggctgagaagttcaggcagaaggcctcaacgcacgagacttgggcttatggcaaagagcagatcttgctgcagaaggattacgagtcggcgtcgctgacagaggtgcgggctctgctgcggaagcacgaggcgttcgagagcgacctggcagcgcaccaggaccgcgtggagcagatcgcagccatcgcgcaggagctcaatgaactggactatcacgacgctgtgaatgtcaatgatcggtgccagaaaatttgtgaccagtgggaccgactgggaacgcttactcagaagaggagagaagccctagagagaatggagaaattgctagaaaccattgatcagcttcacctggagtttgccaagagggctgctcctttcaacaattggatggagggcgctatggaggatctgcaagatatgttcattgtccacagcattgaggagatccagagtctgatcactgcgcatgagcagttcaaggccacgctgcccgaggcggacggagagcggcagtccatcatggccatccagaacgaggtggagaaggtgattcagagctacaacatcagaatcagctcaagcaacccgtacagcactgtcaccatggatgagctccggaccaagtgggacaaggtgaagcaactcgtgcccatccgcgatcaatccctgcaggaggagctggctcgccagcatgctaacgagcgtctgaggcgccagtttgctgcccaagccaatgccattgggccctggatccagaacaagatggaggagattgcccggagctccatccagatcacaggagccctggaagaccagatgaaccagctgaagcagtatgagcacaacatcatcaactataagaacaacatcgacaagctggagggagaccatcagctcatccaggaggcccttgtctttgacaacaagcacacgaactacacgatggagcacattcgtgttggatgggagctgctgctgacaaccatcgccagaaccatcaatgaggtggagactcagatcctgacgagagatgcgaagggcatcacccaggagcagatgaatgagttcagagcctccttcaaccactttgacaggaggaagaatggcctgatggatcatgaggatttcagagcctgcctgatttccatgggttatgacctgggtgaagccgaatttgcccgcattatgaccctggtagatcccaacgggcaaggcaccgtcaccttccaatccttcatcgacttcatgactagagagacggctgacaccgacactgccgagcaggtcatcgcctccttccggatcctggcttctgataagccatacatcctggcggaggagctgcgtcgggagctgcccccggatcaggcccagtactgcatcaagaggatgcccgcctactcgggcccaggcagtgtgcctggtgcactggattacgctgcgttctcttccgcactctacggggagagcgatctgtgatgctgagcttctgtaatcactcatcccatcagaatgcaataaaagcggaagtcacagtttgtttcctggaaactttgacaagctttattaagttgagagagagagaggggaaaaaaaaaagcctttcgtagttcagtaattgccagcaatataacacggctaaaatgaagtttttacagtatatgacatagtgcgcttcataaataggtttatttctgagtttttagcaaaatgtaatgaaatatcaggttgatttctttgattaaacagaacaaattacttgagtaataggaaattaggaggatctagggacagaaggaaagtgaaaaatgtgaaaatacaaaatacccaagatttaagaccggggggaaaaaaccacaaattggtaaataaaggtttgctatttgtaaaaaatttcatttatctctaatatgcttatgtgattgcccctaggggagtatatttgggattctaatgttttattttcatgcttatccaaagattactattgtatcttcaaatgaatttaatattgtgagatggaactgccggggattaaaaagactacccaaaagatttttggcacttacaatttttaaaatagtttatgtcatctcttcattatttagggctggatggtcaactcagtcagtgattttttgatgcttctcttatcctccagaatagagacctaaggacacgtggaagtcagtttaattgccagagagaaggatgcaatcactaggtaaaatgaggtttttaggattatttattgattccaggttcccatgctttttgttagagcttattagtacaggttctcaagagatgaccacataaaagtgctctgtttataaataagcaggtttctgtagtactgactggttcatcacaaggcaagtcagaaaccagtatccttctagctctccagtcaggacttccttatgcctctagttttatgaccggttaaggagaagccagagttagagtaggagaggactaattctcagcagcagtggaggtgagttctttcttttgcggaagctttacatatgttttgtgtagtaggaataactagatattttagctagtgtgcggtgtgtgttcacccctgggattggacagtgtatcctaacaagtcccatgtctggttctgtgtctaaaggcctgctccatgacacaggatgctacatgcactcctgctagcacatcttgatctgttgaatgttcattctttctttttgctcatactgctgtaggctataattcccccctgtttttccatcttgttgacagcttgtagagaataaagcaggaattctttttatatctgagtccttaatgatcaggaaatggattacaaacaaacaaaaacagttgcaaacagcaattaaagcattactagagaagcagtaacatgtctgttacctacagtctgtttgctcagatttttatagatttccaccaacagctggaaatgtaatatttccattccaagctgtctgacagcttgactcttcttcctacactgggccatttagaaccttcaacctttatgaatttcacttaatttgcttcattattaagtaattggtagtttccagattcctgaaatatttgaatccttgagtttaatgccaaacacttttggggtggtttagatgaactctgactctattttatttcaagtaggtgctatatcccggccataaacccctatagaaaagccagaaagttgtgcttcctttgaggctattagggggctctgtggtgttttaggatgggtgtgggtaactcatctacctaaacttttaatttctttacaacattcagcaagagagggggtcagtagtctctatctgctaataaatgaagaaaggaagtaaactctgaaaaataataaacatgtttatactctcattttaggtattatttttatttctgaagctggatgctcaaaaattaaaacgtttataagtttctaaattaaacttaatttataaaagaaaaaaaaaaaaaaa

SEQ ID NO: 481 - DNA, 1174 bp, Artificial Sequence
  MAPK3
ctggcgcgcgcggccctgcgggtgacaggcaggcgggaaggggcggggcctcgggcggggccgccgtggggaggagggcggtgggaggggaggagtggagatggcggcggcggcggctcaggggggcgggggcggggagccccgtagaaccgagggggtcggcccgggggtcccgggggaggtggagatggtgaaggggcagccgttcgacgtgggcccgcgctacacgcagttgcagtacatcggcgagggcgcgtacggcatggtcagctcggcctatgaccacgtgcgcaagactcgcgtggccatcaagaagatcagccccttcgaacatcagacctactgccagcgcacgctccgggagatccagatcctgctgcgcttccgccatgagaatgtcatcggcatccgagacattctgcgggcgtccaccctggaagccatgagagatgtctacattgtgcaggacctgatggagactgacctgtacaagttgctgaaaagccagcagctgagcaatgaccatatctgctacttcctctaccagatcctgcggggcctcaagtacatccactccgccaacgtgctccaccgagatctaaagccctccaacctgctcatcaacaccacctgcgaccttaagatttgtgatttcggcctggcccggattgccgatcctgagcatgaccacaccggcttcctgacggagtatgtggctacgcgctggtaccgggccccagagatcatgctgaactccaagggctataccaagtccatcgacatctggtctgtgggctgcattctggctgagatgctctctaaccggcccatcttccctggcaagcactacctggatcagctcaaccacattctgggcatcctgggctccccatcccaggaggacctgaattgtatcatcaacatgaaggcccgaaactacctacagtctctgccctccaagaccaaggtggcttgggccaagcttttccccaagtcagactccaaagcccttgacctgctggaccggatgttaacctttaaccccaataaacggatcacagtggaggaagcgctggctcacccctacctggagcagtactatgacccgacggatgaggtgggccagtccccagcagcagtggggctgggggcaggggagcaggggggcacgtag

SEQ ID NO: 482 - DNA, 1117 bp, Artificial Sequence
  TIMM17B
tgggggagcagagggcagcacttcctccagctccaaaagagtgcacccaccccaacgttaccaatacactcgtgcaggcggaaagctccgacgccggtgtgcgtctacgctgggggcgtggcctgactgcgcggccagacgccagcgccatggaggagtacgctcgggagccctgcccatggcgaattgtggatgattgcggtggagccttcactatgggtgtcatcggtggcggagtcttccaggccatcaagggtttccgcaatgcccctgtttgcagattgctgtctgaagctcccttgtttatctactcttgctcaagatctgtgtctcccaccgttaatgtgagctctgagagggcagagagcagacctaccttgttcatggctgtatccctgcatatggcatggtgcttggcacatataggaattcggcaccggttgagaggtagtgccaatgctgtgaggatccgagccccccagattggaggtagcttcgcagtgtgggggggcctgttctccaccatcgactgtggcctggtgcggcttcggggcaaggaggatccctggaactctatcaccagtggagcattgaccggggctgtgctggctgcccgcagtggcccactggccatggtgggctcagcaatgatggggggcatcctgttggccctcattgagggcgttggcatcctcctcactcgctacacagcccagcagttccgaaatgcgcccccattcctggaggaccccagccagctgccccctaaggatggcaccccggccccaggctaccccagctatcagcagtaccactgaggaagccactgccaccatgggagctacttctcggttccctccccgatggtctacctcgaagggagggctggctcccagttagccctgggaccctccagagagggtttctactctgctccctagtcccagggtgggggtggggcaccccagctgccctgacagatgggtcccctttttctctctcagggcaccccagccccacactcacatgtacgaagttctcaccccagctcctttgtgtggcaccctgatgagtatttaaagcccgttttgaaatgcctaaaaaaaaaaaaaaaaaa

SEQ ID NO: 483 - DNA, 3578 bp, Artificial Sequence
  ACSF3
gggggacgcgcttgggcgacggacgcgccgcgccggggaagctgttgggcgccggaactggtccggcccgactcacgaccccgcgggacccggccggaacccggcccgaccccggcgcgcgcgcggcggaggacgaggaagagttgtggcgaggcagatcctgccccgtggccgcggccgtctcgtagctcggccgcctgtcagtgcaatgctgccccatgtggtgctcaccttccggcgcctgggctgcgccttggcgtcctgccggctggcgcctgcgagacacagaggaagtggtcttctgcacacagccccagtggcccgctcggacaggagcgccccggtgttcacccgtgccctggcctttggggacagaatcgccctggttgaccagcacggccgccacacgtacagggagctttattcccgcagccttcgcctgtcccaggagatctgcaggctctgcgggtgtgtcggcggggacctccgggaggagagggtctccttcctatgcgctaacgatgcctcctacgtcgtggcccagtgggcgtcatggatgagtggcggtgtggcagtccccctctacaggaagcatcccgcggcccagctggagtatgtcatctgcgactcccagagctctgtggtccttgccagccaggagtacctggagctcctgagcccggtggtcaggaagctgggggtcccgctgctgccgctcacaccagccatctacactggagcagtagaggaaccggcagaggtcccggtcccagagcagggatggaggaacaagggcgccatgatcatctacaccagtgggaccacggggaggcccaagggcgtgctgagcacgcaccaaaacatcagggctgtggtgaccgggctggtccacaagtgggcatggaccaaagacgacgtgatcctccacgtgctcccgctgcaccacgtccatggtgtggtcaacgcgctgctctgtcctctctgggtgggagccacctgtgtgatgatgcctgagttcagccctcagcaggtttgggaaaagttcttaagttctgaaacgccgcggatcaatgtctttatggcagtgcctacaatatacaccaagctgatggagtactacgacaggcattttacccagccgcacgcccaggatttcttgcgtgcagtttgtgaagaaaaaattaggctgatggtctcaggctcagctgccctgcccctcccagtgctggagaagtggaagaacatcacgggccacaccctgctggagcggtatggcatgaccgagatcggcatggctctgtccgggcccctgaccactgccgtgcgcctgccaggttccgtggggaccccactgcctggagtacaggtgcgcattgtctcagaaaacccacagagggaagcctgctcctacaccatccacgcagagggagacgagagggggaccaaggtgaccccagggtttgaagaaaaggagggggagctgctggtgaggggaccctccgtgtttcgagaatactggaataaaccagaagaaactaagagtgcattcaccctggatggctggtttaagacaggggacaccgtggtgtttaaggatggccagtactggatccgaggccggacctcagtggacatcatcaagactggaggctacaaggtcagcgccctggaggtggagtggcacctgctggcccaccccagcatcacagatgtggctgtgattggagttccggatatgacatggggccagcgggtcactgctgtggtgaccctccgagaaggacactcactgtcccacagggagctcaaagagtgggccagaaatgtcctggccccgtacgcggtgccctcggagctggtgctggtggaggagatcccgcggaaccagatgggcaagattgacaagaaggcgctcatcaggcacttccacccctcatgacccggcagactgggactgcgggtctggtggggagcagcagacgtccccttcacaccgagaaccacgggggcccgtccaagacctggcctcccttaaacctgaaccccccaaatcaggtcacgtagaatcaagaactgtttgggatgaaatcaccatgtggggtccccagcctcgggccagttgttgcagctcaaggagaccgtccctggtgtcacctctgcctggtcaccgccgacctcatctgtgcagcgcggtgcagccagcccctggccccacgtgctgaggcacctcccgccccacagtgccctgcagttgccaggctctccagggcaggtcccagaggtttcccacaaaaaacaaagactccactggaggaaacaagcccctgtcccacgccgtctgcacgtgcctgtgcctcacccagagccagtgtctcccggcccacataggaggtctgggcagccacccagggggccctcctgggaggagctgagggttcacaagcctcccagaaccagccctgtcccatgggttccgtgcatttcctggtgctgctcttggaggagagcagctcccactgtggggacacctgccaccctgcacactactgtgtgtccatcagcatgtgtcacagaaagtgcgtggacggatggccccggagctgctctgccgtgaccctgcctcaccccccagcgcagggactttccaggtcatctccacaccagcccctcagccggtgaaccctctctcccatcaccgtctccacccagacccccacctgccccatggcccccatttcatgtctgtggctcaccagcttttccccagacccagctccggagcccacaggcgtggccgatgcagaaacctcaggaaggtgtgttgtgaatgttgggtgcacccacgttgcatttacttagcggggccaattcagatgcacaggggccacatgcagaatccagaagtttctggacaattttcagaagaataggctgcctcctccccacagcctgggggaagtaacagtcatcgcccagcagtgtctggcctgaacttacccagaacattctgcccccggaatgcacgtctgaaagagtggccagaaacgagtgtgccgggcaggaggccagccccatctcaggctcacgtgcctctgacaggagaccagccccatctcaggctcacatgcctcgcggacagttggacgtggcctggggcccctgctcacttgagcatgtcgcccaccaagcttgtctgaggccacagagcagcgtcccagccctgttttccaggactggtgggtgccccagtccacggccctgccccacccgaactcctgcctcacggtgtggccttgtgcatccccatggcctgaccccgggaacagtcagaggaaggggtcccgccctcccgccagaggcctggacccaagggaacggcagtcagagactacagtccagacgtttgtgtctaggccttgctggtagctaaggaaatgccttctgttgggaaaaggtcaaatttaacatagcaaaatttttacttaattccactaattttacatttgcatctctctcctttaatcctgaaacttttgattcctaaaaagcttacataatcatttgctttatccgatagt

SEQ ID NO: 484 - DNA, 1877 bp, Artificial Sequence
  OSR2
cggggccgctactaaagcccaagactcccggcctggggcagcctggggagggacgcgggcggggacggagctcggcgtgcttgctgctggagggtgatggccctgcaaggctgtgggctccgacctcaccgggagtcgacagcgagaggttcgccgaagagcgaggttctgggcgagcgctgaacgccggccccaagcaccccgggtctttacacagtccgcgtccacagactctgacgaagacgtggatctgctctcgctttagctgctcgcggtcctccagatcatgtccgcgactcctgcgactccgcgcggaaaaaaaagtttgccaggcgtggactcaatgacctttccaagctgtgcgcctcgctgcctggaccgggtctgagcgcggctgcccaggttgacctttctgcgggagggctttctctacgtgctgttgtctcactgggtttttgtcggagccccacgccctccggcctctgattcctggaagaaagggttggtcccctcagcacccccagcatcccggaaaatggggagcaaggctctgccagcgcccatcccgctccacccgtcgctgcagctcaccaattactccttcctgcaggccgtgaacaccttcccggccacggtggaccacctgcagggcctgtacggtctcagcgcggtacagaccatgcacatgaaccactggacgctggggtatcccaatgtgcacgagatcacccgctccaccatcacggagatggcggcggcgcagggcctcgtggacgcgcgcttccccttcccggccctgccttttaccacccacctattccaccccaagcagggggccattgcccacgtcctcccagccctgcacaaggaccggccccgttttgactttgccaatttggcggtggctgccacgcaagaggatccgcctaagatgggagacctgagcaagctgagcccaggactgggtagccccatctcgggcctcagtaaattgactccggacagaaagccctctcgaggaaggttgccctccaaaacgaaaaaagagtttatctgcaagttttgcggcagacactttaccaaatcctacaatttgctcatccatgagaggacccacacggacgagaggccgtacacgtgtgacatctgccacaaggccttccggaggcaagatcacctgcgggatcacagatacatccattccaaagaaaaacccttcaaatgtcaggagtgtgggaaaggattttgtcagtctagaactctagcagttcacaaaactttacacatgcaggaatctccacacaaatgtcccacatgtggaagaacctttaatcagagaagtaatctgaaaactcaccttctcacccatacagacatcaagccctacagctgcgagcagtgcggcaaagtgttcaggcgaaactgtgatctgcggcggcacagcctgactcacaccccgcggcaggacttctagagaagcccaggatctgtcccgtgccgccgctgctcccctccccagacacctctccacgtctcctacccagggggtcgcatccctagcccttcactgaccccagctcttcccttgctgcagccgcacctgcagctccagggagttaactcttcttctgggggactgagaactgtagaaagccacacactactacatcccttcacaaagagtatatgctagtttcttgtagatattcacagctcattttagagctctgtacataatgttgtgggtctttgttttgttgttttgtttgctttgggatcttgttggatgcacttagatatggaaaatggaagccaaattttatctttaaagactgtattttcaaaataaaactttttcttgtttgtttcaaaactcc

SEQ ID NO: 485 - DNA, 4954 bp, Artificial Sequence
  SYNPO2L
atgtgtgctggactgtaatgatcccagggccaagttgcctgcctgtggtgtgtggtgtgggggggaggcctggggcagcaggagcaggacagccggacaggaagcccagacggggttcgagcacctcaacttctctcctggggacactgttcaaactccgggggccataggccaagctgagcgatgggtgctgaggaggaggtgctggtcacactatcagggggagccccctggggcttccgacttcatgggggggccgagcagaggaaaccgttacaggtgtctaagattcgaagacggagccaggctggcagagcaggactccgagagagggaccagctcttggcaatcaatggggtctcttgcaccaacctctcccatgccagtgccatgagcctcatcgatgcctcaggaaatcagcttgtcctcactgtgcagcggttagcagacgagggtcctgtgcaatctccatctccccatgagcttcaggtgctgtcacccttatctccactaagtcctgagccccctggtgctccagttcctcagcctcttcagcctgggagccttcgttcacctcctgatagtgaggcttactacggagagactgacagtgatgctgatggccctgccacccaggagaagccccgtcgacctcgccgccgaggccccacaaggcccacccctccgggtgccccacctgatgaggtctacctgtctgacagccctgcagagccagcacctactatccctggccctcccagccagggtgacagccgtgtgagctccccgtcttgggaggatggggcagcccttcagccacccccagctgaggctctgctgttaccccatggccccctccgacctggtcctcatctcatccctatggtggggcctgttccccacccagtggcagaagatcttactaccacctacacccagaaggccaagcaagccaaactgcaacgtgcagagagcctccaagagaagagcataaaagaggccaagaccaaatgcaggacaattgcatccctgctcactgcagcccccaacccccactccaaaggggtacttatgtttaagaaacggcggcagagagccaagaagtacaccctggtgagcttcggggctgctgctgggacaggcgctgaggaggaggacggcgttccccccacgagtgagtccgagctggacgaagaagccttctctgacgcccgcagcctcaccaatcaatctgactgggacagtccctatctggacatggagcttgccagggcgggctcaagagcatcagagggccagggctctgggctgggagggcagctgagtgaggtctctgggcgaggggtgcagctctttgaacagcagcgccagcgcgcagactccagcacccaggaactggcacgggtcgaaccagcagccatgctcaacggggaaggcctgcagtcaccacctcgggcccagagtgctcccccagaggcagctgtgctcccacccagccccttgccggcgcctgtagccagccccagacccttccaaccaggtggtggagccccgaccccagctccaagcatctttaaccggtcagccaggccctttaccccgggcctacaagggcagcggccaactaccacctcggttattttccggcctttagcccccaaaagggcgaacgacagcctggggggcctcagccccgccccaccccccttcttgtcttcgcaggggcccacccctctgcccagcttcacttcaggggttcccagccacgcgccagtctctggttcccccagcaccccacgctcctcgggccctgtgacagccaccagctccctgtacatcccagcccctagtcggcctgtcaccccaggtggagctccagagccccccgctcctcctagcgcagctgccatgacctccaccgcttctatcttcctatctgcgcctttgcgaccctctgcgcgcccagaggcgcctgccccaggcccaggggctcctgagccccccagcgctcgcgagcagcgcatctctgtgccagctgcccgcacgggtatcctgcaggaggcccggcgccgggggacccggaagcagatgttccggccgggaaaggaggagacgaagaactcgcccaaccccgagctgctatcgctggtacagaacctggatgaaaagcctcgggccgggggtgcagaatctggtcctgaagaagatgctctgagcctcggggctgaagcctgcaacttcatgcagccagtaggggccaggagttacaagaccctgcctcacgtgacacctaagaccccccctccaatggctcccaagaccccgccccctatgactcctaagactccacccccagtggctcctaagcccccatctcgagggctccttgatgggctcgtgaatggggcagcctcttcggctggaatccctgagccaccaaggctgcagggcaggggtggggagctgtttgctaagcggcagagccgtgcggacaggtatgtggtggaaggtacacctggtcctggtcttggccctcggcctagaagtccttctcctaccccgtctctgcccccttcctggaaatattcacccaacatccgtgccccgcctcctattgcttacaacccactgctctctccctttttcccccaggcggcccgaactctccctaaggcccaatcccaggggcctcgggcaacacccaagcagggcatcaaggctctagattttatgcggcatcagccctatcaacttaaaactgccatgttctgttttgatgaggttcccccgactcctggccctatcgcctcagggtcccccaaaactgcccgagtccaggagattcgccggttttccactccggcaccccagcccactgcagaacccctggctcccactgtgcttgccccccgagcagccactacactggatgagcccatctggagaacagaactggcctcagcccctgttcctagcccagcccctcctccagaggctcccaggggccttggggcttctcccagctcctgcggtttccaggtagccaggccccgattttcagccaccagaacaggattgcaagctcatgtgtggaggcctggggcagggcaccagtgaacaggcacaggtcccaggaccaaggagaggtggaacatccagttcctaaagttgcttctcctaccctatcccatcccctgtcacgcatctggaagctaaattgcctcctgccagagatggtttccaagttgatgtccccttcccccaccttcctcctcactctctacctccctgccgctttccaaccaagtatgtctgctttggtatctttgcctctctttgtctctgcatttcctttcctggatctctgtctttatttccaggcttctccacccatattcctccacagatctctcttccttgacatttgtgcttttctccctgggcctcattttaatgttcagtgagaagtaaacagagcagaagtgaccactgggacttcaggcaagaagctcaccaccaggcacacagcaaagggactgaactgacccctgtttgcactaagccacccccaccccccactctgctttcccaagcttgactggcatatacctaggcctgtgtgtgtgtgtgtgtgtgtgtgtgtgtgtgtgtgtgtgctcttccgtctaaggcatgaataagaggggaggtcaaaataaagacccaatctgaggccgggcacggtggctcacgccggtaatcccagcactttgggaggccgaggcgggcggatcacgaggtcaggagatcgagaccatcctggctaacacggtgaaaccccatttccactaaaaatacaaaaaattagctgggcgtggtggcgagcgcctgtagtcccagctactcgggaggctgaggcaggagaatggcatgaacctggaaggcggagcttgcagtgagctgagattgcgccactgcactccagcctgggcgacggagcgagactctgtctcaaaacaaacaaacaaacaaaagacccaatctgagtcttatcgttgtactgatagaagggtcagatatccccacatggagttgagtgggagaaagagattcactagagaataactccttagagaccaatgtctgtagcaggtgtacagcatcttgtgaaagttatggagcatgaaaagactgaagggccaggacagtttgcatgggctgagttataccagctagaccaggaatagaacaaagaattctatacctcaggatttcaaaaagttagcaacttgagaggccagtgctgagcaacccagtacccaggaaatgaaaaaaagaaagaaaattccctccgagaatgaacaaatcattggcttcattgcctcatgagcttgagagaaaggagaagagagccagagtgtggcaagtgaggccaaaatcagaagcatggcagaaatgagtgtaagtgattgagccacagacagaagtgtggcgagggacaatgccatattgggagaaggtaaagttgagtaacaagaaaccaaccgtgtgtgagagggggattggaaaaaaatttgagggagaagaatgttagaatggaagggaatgatggtggaagggaggtgtgagggtgtgtgctgagtgttgaaagaacggttggtgtctgtgtgattttccttgagtctgttcttcagtgtgtcttctgcagcttgccatgactgcctgggaaagagtagggaaatacccagagccaaaacctcctttcagtcccaccccatccctcaaaaccccagctattgcttcttttcagcttcaggtcctgatctccaatcttagtatggactcccttctcaccaagaccaccaccagctacgtttgctgtgtaatctggaaagtgataatttcctttgcttgttgggtgtgagtcacaatactttggtttgtgcacaagaataaatttatgccccataccttc

SEQ ID NO: 486 - DNA, 2349 bp, Artificial Sequence
  IFT22
gtcggccctgcgggcctctctccgtcgccatggaaacgaaagcggccaagtagagctccgtcctgacgcgccgcctcccgtgggctccggccggctaagccgcggcggacaactatgctgaaagccaagatcctcttcgtggggccttgcgagagtggaaaaactgttttggccaactttctgacagaatcttctgacatcactgaatacagcccaacccaaggagtgaggtttgagtcctgctggccggccctgatgaaggatgctcatggagtggtgatcgtcttcaatgctgacatcccaagccaccggaaggaaatggagatgtggtattcctgctttgtccaacagccgtccttacaggacacacagtgtatgctaattgcacaccacaaaccaggctctggagatgataaaggaagcctgtctttgtcgccacccttgaacaagctgaagctggtgcactcaaacctggaagatgaccctgaggagatccggatggaattcataaagtatttaaaaagcataatcaactccatgtctgagagcagagacagggaggagatgtcaattatgacctagccagccttcacctgggactgccacatccccagtgaaatcagcatgtttctcggtgcagatctgaaatcacatccagctcctgatgttttcttctccctctgactgcagaggaagtgttcctacctgcaggaaggcacctgtcacacagggcgttcactcagaccatctgtgctctgccctgagttcagttgagaaaatcctattatcaaatttggatttcctggccccagaacttcccaaagacctgtaaaatggagggatttaccacctcacatatgtccagttaaacagtttgtggacttgtaaccgtcgcagcccaatgatacaacagtagtttaatcacgtgtattggcttgaatgtgattttcattccttgattcacccaacaaataccgactggctgagcacctgctgtgtgtgcactgctgttctagctgctgaccatagacagcataaatgaaaaagacagaaattcccaccttcgtggaactctccattttcctaaatgttaggttggtgcaaaactaatcgtggtttttgccatttttaatttttaatggcaaaagccactattacttttgcaccaacctaataggccgattcagaaacttgagtgcaatgtcttggatatgcaaaaaagaaaatcaaaacgcattcttcattctctataagagttctaggcggggcgtggtggctcacacttgtaatcccagcactttgggaggccaaggtgggcggatcatgaggtcaggagatcgagaccatcctgaccaacgtggtgaaaccccatctctactaaaaatagaaaaatcagctgggtgtggtgccgcgtgcctgtaatcccagctacttgggaggctgaggcataagaattgtttgagcccgggagacagaggttgcagtgagccaagattgcgccactgtactccagcttgggcaacagagcaagactccatctcaaaaaaaaaagagttctagcccaggagcggtggctcacacttgtaatcccagcactttgggatgctaaggcaggcggatcacttgaggccaggagttcaagaccagcctggccaacatggcaaaatcccatctctactaaaaatacaaaaattcacagggtgtgttggcacacgcctgtaataccagctactcaggtggctgaggcataagaattgcttgagcctgggaggcagagattgcactgagccgagatcgcgccactatactccagcctgggcaacagacatcctgtctcaaataaattaaattacattaaatgtttaagaagaagtctaaataagtttcatatgctgccctccctcagataatgagggaacctggggtacttaaaatgccaaatgaacgtatacttgatccttattcatagattttgtatttgagaatttgcctactcactaaaatatgtttgtaacccccaaatcaatactgtggcactttctcagttattcgcagacacacagagacaaaaaatttgaagtgcctggctgggcgtggtggctcacgcctgtaatcccagcactttgggaggccgaggcaggcggatcacaaggtccagagatcgagaccatcctggccaacatggtgaaaccccgtctctactaaaaatacaaaaattagctgggcatggtggggcatgcctgtagtcccagctactcagaagggtgaggcagaattgcctgaacccgcgaggcggagactgcagtgagccgagatcgcaccactgcactccagcctggtgacagagca

SEQ ID NO: 487 - DNA, 3028 bp, Artificial Sequence
  CPN2
ggattgagctgaccacaggccacaccagactcctctctgctcctgaggaagacagggcagcccggcgccacccgctcggccctcacgaagatgctccctggagcctggctgctctggacctccctcctgctcctggccaggcctgcccagccctgtcccatgggttgtgactgcttcgtccaggaggtgttctgctcagatgaggagcttgccaccgtcccactggacatcccgccatatacgaaaaacatcatctttgtggagacctcgttcaccacattggaaaccagagcttttggcagtaaccccaacttgaccaaggtggtcttcctcaacactcagctctgccagtttaggccggatgccttcggggggctgcccaggctggaggacctggaggtcacaggcagtagcttcttgaacctcagcaccaacatcttctccaacctgacctcgctgggcaagctcaccctcaacttcaacatgctggaggctctgcccgagggtcttttccagcacctggctgccctggagtccctccacctgcaggggaaccagctccaggccctgcccaggaggctcttccagcctctgacccatctgaagacactcaacctggcccagaacctcctggcccagctcccggaggagctgttccacccactcaccagcctgcagaccctgaagctgagcaacaacgcgctctctggtctcccccagggtgtgtttggcaaactgggcagcctgcaggagctcttcctggacagcaacaacatctcggagctgccccctcaggtgttctcccagctcttctgcctagagaggctgtggctgcaacgcaacgccatcacgcacctgccgctctccatctttgcctccctgggtaatctgacctttctgagcttgcagtggaacatgcttcgggtcctgcctgccggcctctttgcccacaccccgtgcctggttggcctgtctctgacccataaccagctggagactgtcgctgagggcacctttgcccacctgtccaacctgcgttccctcatgctctcatacaatgccattacccacctcccagctggcatcttcagagacctggaggagttggtcaaactctacctgggcagcaacaaccttacggcgctgcacccagccctcttccagaacctgtccaagctggagctgctcagcctctccaagaaccagctgaccacacttccggagggcatcttcgacaccaactacaacctgttcaacctggccctgcacggtaacccctggcagtgcgactgccacctggcctacctcttcaactggctgcagcagtacaccgatcggctcctgaacatccagacctactgcgctggccctgcctacctcaaaggccaggtggtgcccgccttgaatgagaagcagctggtgtgtcccgtcacccgggaccacttgggcttccaggtcacgtggccggacgaaagcaaggcagggggcagctgggatctggctgtgcaggaaagggcagcccggagccagtgcacctacagcaaccccgagggcaccgtggtgctcgcctgtgaccaggcccagtgtcgctggctgaacgtccagctctctcctcagcagggctccctgggactgcagtacaatgctagtcaggagtgggacctgaggtcgagctgcggttctctgcggctcaccgtgtctatcgaggctcgggcagcagggccctagtagcagcgcatacaggagctggggaagggggcctctggggcctgaccaggcgacaggtaggggcggaggggagctgagtctccgaagccttggcttttcacatgcaagggacagggttacatccccaaggtgagggggtggagtctggtctgctccactaaccagggtctcctcctcctcttccttcatcgcttctcctggagtgtgcggcctaacaaggccatccttatgccttgcaaagcaccctcaaaagctgcaccacagcctggagaataaaatatcctcagccctgatgcctccccattatgtaacacccaaccgctctcacctacaccctgaggtctattcactgcatcccagtgatacaaagtggaggccactgccttctgacatctggctcaaaagcccagtgtctgtttccatttatttccctggaatttcatttaaaattggtatagagaaaaaaaggatgtgacagaagcagagatgaccagaaagcacaggggcagggttctgactggcgtgtgggagaccctgtggccggcacccacctccacacgaggactaagctctgatttttttatcttgcccaaattcctacctaaggggtctagggagtcgcgccttacaaatcataaattctcatcagatgggttttatttgaccctgtatatcatgacttatttttaatctgactatggcataacattacaagacgaggcaaaaatatttaacccccaaatatatttccttgccctaccttgaacttgccctgcagagtctcttgtgaggagaatccacatcctataaagaagcccctttcccctttgttttccttcctttctttccagtccaggagatcatcaactaagagccaggcaccccttttaagtcgataagaaacagtttacaacctgctctctctctctctgaagtctgctgagagcttcccctgcacaataaaacttggcctccacgatcctttatcttaacctgaacattcctttccattgatcccaggtcttcagctaagctcaaccaattgtcaaccagaaaatgtttaaatttacctacagcctggaagcacccacccccgctgcttcgagttgtcctgcctttctgaactcaaccaatgtatttcttaaatgtatttgattgatgcctcattcctccctaaaatgtataaaaccaagctgtacctcgaccaccttgggcacatgttcccaggccctcctgaggtctgtgtcacgggccatggccactcatatttggctcagaataaatctcttcaaatatttta

SEQ ID NO: 488 - DNA, 3393 bp, Artificial Sequence
  NKAIN2
gggcgaaacttcgcgggccagatgcccgagggcgcggcggcgctgccaggctgccgctgctgcccctgcgggccccgagcgcgcctccgcaggcggcactgcccgcggcgcggcgtgtgcaccgagcgagtgaaggtatgtgtggcgggcgcggctggagctgccgccgccgccgccgccgcgccagcaggtcctaatgcctgtcacttcccaggacgctggcagcagcagcagcccggagcccccgagccctcggcaggtttgcgtgtccttccccgcgatctgattggataaagtgggggctcgacggtggccgacgtgggacagtctggctgtggcaggggtctcggaaaccatgggttattgcagtggcaggtgcacgcttatctttatctgtggcatgcaactggtttgtgtgctggagaggcaaatatttgacttccttggatatcagtgggcacctatcctggcaaattttgtacatattattatcgtcattcttggtttgtttggaactattcaatatagacctcgttacataacaggatatgctgtctggctagtcctctgggttacgtggaatgtgtttgttatctgcttctatttggaggctggggacctctcaaaggaaacagaccttatcctgacttttaatatatcaatgcaccgatcttggtggatggagaatggaccaggatgtacggtgacgtcagtgacacctgccccagactgggccccagaagaccatcgctacatcacggtctcagggtgtttgctggagtaccagtacatagaagtggctcatagttccctccagattgtcctcgcactggcaggtttcatctacgcctgttatgttgtgaaatgtataactgaagaagaggacagctttgatttcataggtggctttgactcttatggctatcaagggcctcagaagacatctcatttacaactacagcctatgtacatgtcaaaataatacagatgacttcagtatgtcagcccatggacctttcaaagaacttttttcgcagtggcctcctgcatttcatgaagagcaagaagcaactgagtttaaatacatacacgtattaacaaaacaaatgcaaagcctctacatacaacactgacacacacacacacacacacgtgagcacgcacacaccaattccacttgacctcctctttctaactgaaacagacaaatatgcaggacacgcccatcttggatttcctgaaagcaggcccctttctcccaggccttcggaaagttcagaaggagatgtgttgatgcccaacggttgccggccattgctaactcctctgcagcccagcgggttggcctctgtgagctgggaagtcatccaaggcacattagtttgagagctctgtcttctgcactccatacatcttgacagcaccacggctacttaggcaatgtaattgcaaaaacaaacgaaacatgccatgatgaccttgtacccgaagtccgaaatggcagattgtttgccctaaaggctgtaccgtacatacttgccttaacccacctacattgtgtgcccaagaatcccagtgcagacagccccaagccacttcctttaggctaacacactgctattaattctaaatgagttcaagcctgtgtgtttcatgtcaaggaacaagactgaatagctcagcagctccagtgtgtctgtataagaaaagtgccagctgtcagcaaagtgctttaccatagagcctccatggtggcccaaaagagacaagtaacaataacaatatctgtcatctttataattctaaaatatggtcttctgatggggttgggggtgggacagagtaaaacattaatctactaaactcactaatctactggaagcagaaagcagaaatggcttaactcgctgattttatttattgcactctaggtgcttttataagtatctacaattgtcttttactaacacagaaacagctgtggatttctatcaacagaggccaactgaatatgtattagctatgtttactcttttatatctaattcaaattgaagactctacgtaggtgaacttttttttctaacttcagtgtacaagattatttttgggtgggtggggggagcaatagttaccttggtgaaatatttgagatctttttgtggtatttgggggatctgttgtgtgttagagtgtatttcaaccctcctgtattattgtggcagaaaaactgtgctgttaacgtagttggcaacaagatgcctttggaaacttaatagtaggtcaatgtgtttatggaatattctgaactcctaggaaattttgttctatattttaaagcattatttggttttcattagtggaaaacataattagctcaggcttatcaggaactcagatgagtcatattttttcttggatacacctgagacattaaactcaattttttaaaactaacacaccattctttagtgcagtgaaattcaaaagttataaattggcatggagcaagttttttctttgatttctatgaagtttcagttattggattaaactactttagaccttagcccattcggatctacatacaccagttccattactgtgtttgcatggatgtctgtaatatacacacacatatacatttgaaaatgatagaggaacaaagagttatcattggaacataaactataaaaaaagattccagcactcatgcttgaatttcctcagtgggttgtatgtttgtccatacatacatgtataaaataaacaattgcaaacatgtcagtgaaacctcatatgacgcttttatagtgacatgcatgtttaatgtatgagaaaaatatttaccaatgtattgtcctttgagtcctaaaatataaatactatacatgccagaaactattctaatgtgacttttaatgtgactattaaaaatgaggtttcactgtacattcatgctgtgatgcgatttcaccttatagtacatgtatatgggtacagaaaataaaccctcatattcctgctttaagttacagccaagttttcaccaaatcacaactatcatcaccaccaaaattttaaaaaacagtagttgactactaaaaagtaatcagtggacaggtcatttatgggatcagtaagcacagtagtgtgattatatctgggaaaacatctacagttgtacagctgtatcctcctcaaaatccggtgaagaatgctatttttctaggctgagcttttgttataaacttaatattcagaaggcaagggttatgatcctgatgtgtcctttttttttgcatttgttaattctgaatgtatttttaacagaatgatttttttgacttactagtgtaatttgcattttaaaaataaatggaaaaatacttaa

SEQ ID NO: 489 - DNA, 4927 bp, Artificial Sequence
  PRG4
aaactcatctatcctttacggcaagggtacctacggtacctgaaaacaacgatggcatggaaaacacttcccatttacctgttgttgctgctgtctgttttcgtgattcagcaagtttcatctcaagagctttcctgtaaaggccgctgctttgagtccttcgagagagggagggagtgtgactgcgacgcccaatgtaagaagtatgacaagtgctgtcccgattatgagagtttctgtgcagaagtgcataatcccacatcaccaccatcttcaaagaaagcacctccaccttcaggagcatctcaaaccatcaaatcaacaaccaaacgttcacccaaaccaccaaacaagaagaagactaagaaagttatagaatcagaggaaataacagaagaacattctgtttctgaaaatcaagagtcctcctcctcctcctcctcttcctcttcttcttcaacaattcggaaaatcaagtcttccaaaaattcagctgctaatagagaattacagaagaaactcaaagtaaaagataacaagaagaacagaactaaaaagaaacctacccccaaaccaccagttgtagatgaagctggaagtggattggacaatggtgacttcaaggtcacaactcctgacacgtctaccacccaacacaataaagtcagcacatctcccaagatcacaacagcaaaaccaataaatcccagacccagtcttccacctaattctgatacatctaaagagacgtctttgacagtgaataaagagacaacagttgaaactaaagaaactactacaacaaataaacagacttcaactgatggaaaagagaagactacttccgctaaagagacacaaagtatagagaaaacatctgctaaagatttagcacccacatctaaagtgctggctaaacctacacccaaagctgaaactacaaccaaaggccctgctctcaccactcccaaggagcccacgcccaccactcccaaggagcctgcatctaccacacccaaagagcccacacctaccaccatcaagtctgcacccaccacccccaaggagcctgcacccaccaccaccaagtctgcacccaccactcccaaggagcctgcacccaccaccaccaaggagcctgcacccaccactcccaaggagcctgcacccaccaccaccaaggagcctgcacccaccaccaccaagtctgcacccaccactcccaaggagcctgcacccaccacccccaagaagcctgccccaactacccccaaggagcctgcacccaccactcccaaggagcctacacccaccactcccaaggagcctgcacccaccaccaaggagcctgcacccaccactcccaaagagcctgcacccactgcccccaagaagcctgccccaactacccccaaggagcctgcacccaccactcccaaggagcctgcacccaccaccaccaaggagccttcacccaccactcccaaggagcctgcacccaccaccaccaagtctgcacccaccactaccaaggagcctgcacccaccactaccaagtctgcacccaccactcccaaggagccttcacccaccaccaccaaggagcctgcacccaccactcccaaggagcctgcacccaccacccccaagaagcctgccccaactacccccaaggagcctgcacccaccactcccaaggaacctgcacccaccaccaccaagaagcctgcacccaccactcccaaagagcctgccccaactacccccaaggagactgcacccaccacccccaagaagctcacgcccaccacccccgagaagctcgcacccaccacccctgagaagcccgcacccaccacccctgaggagctcgcacccaccacccctgaggagcccacacccaccacccctgaggagcctgctcccaccactcccaaggcagcggctcccaacacccctaaggagcctgctccaactacccctaaggagcctgctccaactacccctaaggagcctgctccaactacccctaaggagactgctccaactacccctaaagggactgctccaactaccctcaaggaacctgcacccactactcccaagaagcctgcccccaaggagcttgcacccaccaccaccaaggagcccacatccaccacctctgacaagcccgctccaactacccctaaggggactgctccaactacccctaaggagcctgctccaactacccctaaggagcctgctccaactacccctaaggggactgctccaactaccctcaaggaacctgcacccactactcccaagaagcctgcccccaaggagcttgcacccaccaccaccaaggggcccacatccaccacctctgacaagcctgctccaactacacctaaggagactgctccaactacccccaaggagcctgcacccactacccccaagaagcctgctccaactactcctgagacacctcctccaaccacttcagaggtctctactccaactaccaccaaggagcctaccactatccacaaaagccctgatgaatcaactcctgagctttctgcagaacccacaccaaaagctcttgaaaacagtcccaaggaacctggtgtacctacaactaagactcctgcagcgactaaacctgaaatgactacaacagctaaagacaagacaacagaaagagacttacgtactacacctgaaactacaactgctgcacctaagatgacaaaagagacagcaactacaacagaaaaaactaccgaatccaaaataacagctacaaccacacaagtaacatctaccacaactcaagataccacaccattcaaaattactactcttaaaacaactactcttgcacccaaagtaactacaacaaaaaagacaattactaccactgagattatgaacaaacctgaagaaacagctaaaccaaaagacagagctactaattctaaagcgacaactcctaaacctcaaaagccaaccaaagcacccaaaaaacccacttctaccaaaaagccaaaaacaatgcctagagtgagaaaaccaaagacgacaccaactccccgcaagatgacatcaacaatgccagaattgaaccctacctcaagaatagcagaagccatgctccaaaccaccaccagacctaaccaaactccaaactccaaactagttgaagtaaatccaaagagtgaagatgcaggtggtgctgaaggagaaacacctcatatgcttctcaggccccatgtgttcatgcctgaagttactcccgacatggattacttaccgagagtacccaatcaaggcattatcatcaatcccatgctttccgatgagaccaatatatgcaatggtaagccagtagatggactgactactttgcgcaatgggacattagttgcattccgaggtcattatttctggatgctaagtccattcagtccaccatctccagctcgcagaattactgaagtttggggtattccttcccccattgatactgtttttactaggtgcaactgtgaaggaaaaactttcttctttaaggattctcagtactggcgttttaccaatgatataaaagatgcagggtaccccaaaccaattttcaaaggatttggaggactaactggacaaatagtggcagcgctttcaacagctaaatataagaactggcctgaatctgtgtattttttcaagagaggtggcagcattcagcagtatatttataaacaggaacctgtacagaagtgccctggaagaaggcctgctctaaattatccagtgtatggagaaacgacacaggttaggagacgtcgctttgaacgtgctataggaccttctcaaacacacaccatcagaattcaatattcacctgccagactggcttatcaagacaaaggtgtccttcataatgaagttaaagtgagtatactgtggagaggacttccaaatgtggttacctcagctatatcactgcccaacatcagaaaacctgacggctatgattactatgccttttctaaagatcaatactataacattgatgtgcctagtagaacagcaagagcaattactactcgttctgggcagaccttatccaaagtctggtacaactgtccttagactgatgagcaaaggaggagtcaactaatgaagaaatgaataataaattttgacactgaaaaacattttattaataaagaatattgacatgagtataccagtttatatataaaaatgtttttaaacttgacaatcattacactaaaacagatttgataatcttattcacagttgttattgtttacagaccatttaattaatatttcctctgtttattcctcctctccctcccattgcatggctcacacctgtaaaagaaaaaagaatcaaattgaatatatcttttaagaattcaaaactagtgtattcacttaccctagttcattataaaaaatatctaggcattgtggatataaaactgttgggtattctacaacttcaatggaaattattacaagcagattaatccctctttttgtgacacaagtacaatctaaaagttatattggaaaacatggaaatattaaaattttacacttttactagctaaaacataatcacaaagctttatcgtgttgtataaaaaaattaacaatataatggcaataggtagagatacaacaaatgaatataacactataacacttcatattttccaaatcttaatttggatttaaggaagaaatcaataaatataaaatataagcacatatttattatatatctaaggtatacaaatctgtctacatgaagtttacagattggtaaatatcacctgctcaacatgtaattatttaataaaactttggaacattaaaaaaataaattggaggcttaaggatta

SEQ ID NO: 490 - DNA, 5403 bp, Artificial Sequence
  EML4
ggggcgcggcgcggcgcggcgctcgcggctgctgcctgggagggaggccgggcaggcggctgagcggcgcggctctcaacgtgacggggaagtggttcgggcggccgcggcttactaccccagggcgaacggacggacgacggaggcgggagccggtagccgagccgggcgacctagagaacgagcgggtcaggctcagcgtcggccactctgtcggtccgctgaatgaagtgcccgcccctctaagcccggagcccggcgctttccccgcaagatggacggtttcgccggcagtctcgatgatagtatttctgctgcaagtacttctgatgttcaagatcgcctgtcagctcttgagtcacgagttcagcaacaagaagatgaaatcactgtgctaaaggcggctttggctgatgttttgaggcgtcttgcaatctctgaagatcatgtggcctcagtgaaaaaatcagtctcaagtaaaggccaaccaagccctcgagcagttattcccatgtcctgtataaccaatggaagtggtgcaaacagaaaaccaagtcataccagtgctgtctcaattgcaggaaaagaaactctttcatctgctgctaaaagcataaaacgaccatcaccagctgaaaagtcacataattcttgggaaaattcagatgatagccgtaataaattgtcgaaaataccttcaacacccaaattaataccaaaagttaccaaaactgcagacaagcataaagatgtcatcatcaaccaagaaggagaatatattaaaatgtttatgcgcggtcggccaattaccatgttcattccttccgatgttgacaactatgatgacatcagaacggaactgcctcctgagaagctcaaactggagtgggcatatggttatcgaggaaaggactgtagagctaatgtttaccttcttccgaccggggaaatagtttatttcattgcatcagtagtagtactatttaattatgaggagagaactcagcgacactacctgggccatacagactgtgtgaaatgccttgctatacatcctgacaaaattaggattgcaactggacagatagctggcgtggataaagatggaaggcctctacaaccccacgtcagagtgtgggattctgttactctatccacactgcagattattggacttggcacttttgagcgtggagtaggatgcctggatttttcaaaagcagattcaggtgttcatttatgtgttattgatgactccaatgagcatatgcttactgtatgggactggcagaagaaagcaaaaggagcagaaataaagacaacaaatgaagttgttttggctgtggagtttcacccaacagatgcaaataccataattacatgcggtaaatctcatattttcttctggacctggagcggcaattcactaacaagaaaacagggaatttttgggaaatatgaaaagccaaaatttgtgcagtgtttagcattcttggggaatggagatgttcttactggagactcaggtggagtcatgcttatatggagcaaaactactgtagagcccacacctgggaaaggacctaaaggtgtatatcaaatcagcaaacaaatcaaagctcatgatggcagtgtgttcacactttgtcagatgagaaatgggatgttattaactggaggagggaaagacagaaaaataattctgtgggatcatgatctgaatcctgaaagagaaatagaggttcctgatcagtatggcacaatcagagctgtagcagaaggaaaggcagatcaatttttagtaggcacatcacgaaactttattttacgaggaacatttaatgatggcttccaaatagaagtacagggtcatacagatgagctttggggtcttgccacacatcccttcaaagatttgctcttgacatgtgctcaggacaggcaggtgtgcctgtggaactcaatggaacacaggctggaatggaccaggctggtagatgaaccaggacactgtgcagattttcatccaagtggcacagtggtggccataggaacgcactcaggcaggtggtttgttctggatgcagaaaccagagatctagtttctatccacacagacgggaatgaacagctctctgtgatgcgctactcaatagatggtaccttcctggctgtaggatctcatgacaactttatttacctctatgtagtctctgaaaatggaagaaaatatagcagatatggaaggtgcactggacattccagctacatcacacaccttgactggtccccagacaacaagtatataatgtctaactcgggagactatgaaatattgtactgggacattccaaatggctgcaaactaatcaggaatcgatcggattgtaaggacattgattggacgacatatacctgtgtgctaggatttcaagtatttggtgtctggccagaaggatctgatgggacagatatcaatgcactggtgcgatcccacaatagaaaggtgatagctgttgccgatgacttttgtaaagtccatctgtttcagtatccctgctccaaagcaaaggctcccagtcacaagtacagtgcccacagcagccatgtcaccaatgtcagttttactcacaatgacagtcacctgatatcaactggtggaaaagacatgagcatcattcagtggaaacttgtggaaaagttatctttgcctcagaatgagactgtagcggatactactctaaccaaagcccccgtctcttccactgaaagtgtcatccaatctaatactcccacaccgcctccttctcagcccttaaatgagacagctgaagaggaaagtagaataagcagttctcccacacttctggagaacagcctggaacaaactgtggagccaagtgaagaccacagcgaggaggagagtgaagagggcagcggagaccttggtgagcctctttatgaagagccatgcaacgagataagcaaggagcaggccaaagccacccttctggaggaccagcaagacccttcgccctcgtcctaacaccctggcttcagtgcaactcttttccttcagctgcatgtgattttgtgataaagttcaggtaacaggatgggcagtgatggagaatcactgttgattgagattttggtttccatgtgatttgttttcttcaatagtcttattttcagtctctcaaatacagccaacttaaagttttagtttggtgtttattgaaaattaaccaaacttaatactaggagaagactgaatcattaatgatgtctcacaaattactgtgtacctaagtggtgtgatgtaaatactggaaacaaaaacagcagttgcattgattttgaaaacaaacccccttgttatctgaacatgttttcttcaggaacaaccagaggtatcacaaacactgttactcatctactggctcagactgtactacttttttttttttttttcctgaaaaagaaaccagaaaaaaatgtactcttactgagataccctctcaccccaaatgtgtaatggaaaatttttaattaagaaaaacttcagttttgccaagtgcaatggtgttgccttctttaaaaaatgccgttttcttacactaccagtggatgtccagacatgctcttagtctactagagaggtgctgccttttctaagtcataatgaggaacagtcccttaatttcttgtgtgcaactctgttttatcctagaactaagagagcattggtttgttaaagagctttcaatgtatattaaaaccttcaatactcagaaatgatggattcctccaaggagtcctttactagcctaaacattctcaaatgtttgagattcaagtgaatggaaggaaaaccacatgcctttaaaactaaactgtaataattacctggctaatttcagctaagccttcatcataatttgttccctcagtaataggagaaatataaatacagtaagtttagattattgaattggtgcttgaaatttattggttttgttgtaattttatacagattatatgagggataagatactcatcaaattgcaaattcttttttttacagaagtgtgggtaacagtcacagcagttttttttaccaacagcatacttaacagacttgctgtgtagcagtttttttctggtggagttgctgtaagtcttgtaagtctaatgtggctatcctactcttttgggcaatgcatgtattatgcattggaaaggtattttttttaagttctgttggctagctatggttttcagtacatttcctactttaagagtaattactgacaaatatgtatttcctatatgtttatactttgattataaaaaagtattttgttttgattttttaacttgctgcattgttttgatactttctatttttttggtcaaatcatgtttagaaactttggatgagttaagaagtcttaagtatgcaggcgtttacgtgattgtgccattccaaagtgcatcagaactgtcattcccttctaatatcttctcaggagtaatacaaatcaggtatttcatcatcatttggtaatatgaaaactccagtgaactcccaaggacatttacaacatttatattcacacgctgtatggaagggtgtgggtgtgtgtgaaggggcgagtggagacactgtgtgtatctctagataagaagatatgcaccacgttgaaaatactcagtgtagatctctatgtgtataggtatctgtatatctttccttttgtttacaactgttaaaaaacctcaaaatagttctcttcaaaagaagagagattccaagcaacccatctttcttcagtatgtatgttctgtacatacttatcggagcgcgccagtaagtatcaggcatatatatctgtctgttagcaatgattattacatcatcagatcagcatgtgctatactccctgcaagaaatatactgacatgaacaggcagttcttggagaagaaagagcatttctttaagtacctggggaatacagctctcagtgatcagcagggagtttatttgaggacatcagtcacctttggggttgccatgtacaatgagatttataatcatgatactcttcggtggtagtttcaaaagacactactaatacgcaggaagcgttccagctatttaatgctggcaactactgtttaatggtcagttaaatctgtgataatggttggaagtgggtggggttatgaaattgtagatgtttttagaaaaacttgtgaatgaaaatgaatccaagtgtttcatgtgaagatgttgagccattgctatcatgcattcctgtctcatggcagaaaattttgaagattaaaaaataaaataatcaaaatgtttcctctttctaaaaaaaaaaaaaaaaaa

SEQ ID NO: 491 - DNA, 1283 bp, Artificial Sequence
  CLEC12B
ggggcagtagagtgtgtctgggtcagctgagtgactacatcaaagctcccagccttgaaaaacacatgctgttcccaggcctcaagatattgaaacattaattagataatttaaagtagcgttttcttctacaatgtctgaagaagtgacctacgcgacactcacatttcaggattctgctggagcaaggaataaccgagatggaaataacctaagaaaaagagggcatccagctccatctcccatttggcgtcatgctgctctgggtctggtaactctttgcctgatgttgctgattgggctggtgacattggggatgatgtttttgcagatatctaatgacattaactcagattcagagaaattgagtcaacttcagaaaaccatccaacagcagcaggataacttatcccagcaactgggcaactccaacaacttgtccatggaggaggaatttctcaagtcacagatctccagtgtactgaagaggcaggaacaaatggccatcaaactgtgccaagagctaatcattcatacttcagaccacagatgtaatccatgtcctaagatgtggcaatggtaccaaaatagttgctactattttacaacaaatgaggagaaaacctgggctaacagtagaaaggactgcatagacaagaactccaccctagtgaagatagacagtttggaagaaaaggattttcttatgtcacagccattactcatgttttcgttcttttggctgggattatcatgggactcctctggcagaagttggttctgggaagatggctctgttccctctccatccttatttagtactaaagaacttgaccagatcaatggatccaaaggatgtgcttattttcaaaaaggaaatatttatatttctcgctgtagtgctgaaattttttggatttgcgagaagacagctgccccagtgaagactgaggatttggattagtatgcttcttccaaattctccaagaagtaagagacttgtgagtaagctcatatgaggaaagaggaaactacggtaccagagccaaaccagcttttaaaatgactgtgtatttacattatcagacaaatgaacttgtttaacagaacattctccagttccttgtctgacgtcttctgatttgatgttattattcggtcttaaaattatacctggggacaaaggggaatagccatactatggccctatgattgtctcagaatcatttcactgaatttctttgctttctcaaataaagactcctttctttcattattattat

SEQ ID NO: 492 - DNA, 4148 bp, Artificial Sequence
  UGT8
gtcagagttcgcaactcgagcgcccagagggctcgcgaaaagtcccagcctgcaagccaaccgcgctcagcggacgactggccggatcccaacgcgctgccccttgcccagcctgcgagcgcgtggtacgaaggcgcgtctgcatccatgccccagcccggggagctggaggcgctcgcagtcagaggcgagtgatgctaggctgagcgcgtggcggcccgtgtcgtgccccgctgagccaagtgcggaagggcagcggcgcgctccgactctgctcgccgcacgcagggcggggcgcggctggggggcggggggcctggccgcccgctgggagctgcggacgagcaggcgcgctgaggacccgagggaggacacggttaaagcattgctatcaactgtgaacccagagagccctccttagccaacacgctaactccgaagcctcccttacgcccccgaaccaccgaaggcggcgacacctgattcagcgcacaaacacaggtcccttctgtcccggatacaattacgcggcagacacacactcagactcgcgcggggcagccaagagacgagctatgaagtcttacactccatatttcattctcctgtggagtgctgttgggatagcgaaggctgccaaaatcatcatcgtgccgccaattatgtttgaaagccatatgtacattttcaagacgctagcctcagccttgcacgagagaggccaccatacagtgttcctcctctctgaaggcagagacatcgccccatctaatcattacagcctccagcgctacccagggatctttaacagtaccacctcagatgctttcctacagtccaagatgcggaatattttctctgggagattgacagcaatcgaactgtttgacatactggatcactatactaagaactgtgacctgatggttggcaaccatgccctgatccagggtctgaagaaagaaaaatttgacctgctgctggtggaccctaatgatatgtgtggatttgtgatagctcatcttttaggggttaaatatgctgtattttcaactggcctttggtatcctgctgaagtgggtgctcctgctccattagcatacgtcccagagtttaactcactcctcacagaccgcatgaacttgctgcaaaggatgaaaaataccggtgtttacctcatttccagattaggggtcagctttctggttcttcccaaatatgaaaggataatgcagaagtacaacctgctgccggagaagtccatgtatgatttggttcatgggtccagcctgtggatgctgtgtactgacgtagcactggaattcccaagacccactctgcctaatgttgtttatgtaggaggaatcctaaccaaaccagccagcccactaccagaagatctccaaagatgggtaaatggtgctaatgaacatggctttgtcttggtgtcttttggagctggtgtcaagtatctgtcagaagacattgctaacaaactggcaggagctctggggagattgcctcaaaaagtgatttggaggttttctggacccaaaccaaagaatctaggaaacaacactaaactcatagaatggttaccacaaaatgacctgcttgggcattcaaagattaaagccttcctgagccatggtggtttgaacagtatttttgaaactatgtatcatggtgtgcctgtagtgggaattccactctttggagaccattatgatactatgaccagagtacaggcaaaaggcatggggatattgctagaatggaagacagttactgaaaaagagctctatgaagcactagtgaaggttatcaataatcccagctaccgtcagagggctcagaagctttcggaaattcacaaggatcaacctggtcaccctgtcaatcgaactatctattggatagattatattattcgtcacaatggagcccatcacctacgtgccgctgtccatcagatctccttttgtcagtattttttactggatattgcctttgtgcttttgcttggtgctgccttgttatactttctcttgtcttgggtgacaaaatttatctacagaaaaatcaaaagtctgtggtctagaaataagcatagcacagttaatggacattaccacaatggaatcctcaatggcaagtacaaaagaaatggccatattaaacatgaaaagaaagtgaaatgagccaacagcccaggtgatagaaataaattggttcactcattgaatttttattgctattatttagtctaacagctactaaaagtaaaacatcagtaaacaattctaacatgcccttatgagatctactaatgaaattctgtggaattaagatggctgtaaaaagcacaaacctaaaatgcagaaatgtattttattcaaatactgatgtagagagttttggcactgaaccttttagaagccttaattatttaaatcaattcagtgactgtgtcagaccttagttttaaatcttgatatgtgcgtgtcccggatcaggaatggtttcatttttcttaataatgtgtgtgtgtgtatgtgtgtgtgtgtgtgtgtgtgtttgtgtgtgtgtgtgtgtgtcctaattaagagaatttttactggctgcttgttacatttgttgagggtacaacacactcaagaataaagtaaaaggatagtcaggatccagatgtttcttttctagcatttaatgtgtgtgaactcagaacactaccatgaaagaacacttccccccaaaactggatgcagaggaagaaaaaaaaaaaagaaatggcacagttttttgtatttttttttttagttattttttgttgttgttgtttgtattgtttttcttttctgatagagtatggccacttctgggggaaaaacatgtaattaagtaaatgtatacattggttttcacgttttacttttgttttcccactaccaataattttcctctggaagaattttatagttttttctatttcattttaatgagtaacaatatgttaaatgcataattaagacaaagcaatgaaattctgactttattcaaagtactgaagattattgcttctagggcatttttaaacagcaccattgtattgttgaatgtttatgtaactgatggcttttctataatgtaatttttgaatgttcaggtgttacatttccaaagtttaacttttaaaaaaccatcttctgatcccttttattgtctgggccatacaatctatattacataggtgccaacatttaattcttttaaatggaacatttgcagttttccatattggtacctgctttttctggagaggtttgagatcttgttaacaaatcagactttacactatatacagatgtgacagataaattgaaccacttgtttgtgaaaatgagttcctgtcatcttcctcattcactcagccctcaccccagcagccttttccggtcattgtagctgacatggagcagtgacagtattcatttgagaacagggatgcaagtcacagacatcataaaatcagggtctccctgctgaagcattcactagttggcaactatgaatttattccatgtcattctgtttacttagcacttgcactacccttgttggttgagtgtatgctttatttgtttctagtttgaaatcccacatctgatagctgagagtaggcaaatacaacatttacctaatgtcattcactaacatggaagagttgtgaaaattctagagtgctgtaaatccttggcatacactatgacaaacaacttcattactctcccaccaggagctgctctcctgcacttagaaataatgtcacaagtagttttctaatgtacaatgcagacaaatgtactgctctctgaatacttgaagaaatggtattatacatacatagaaacttattagttataccttttcacaatcttattacgatgttgccgttaaaagggaaaaaagacacaggcaatgaatggtgggatagtaagaggacttagagtgtatgaatgagttgattttacttttttggaatttgattaagttgacagtaggcactgattggatgattaaacataagttaatctccactgtgataaaaacttaaataataaacatgatttaaaatagaaaaaaaaaaa

SEQ ID NO: 493 - DNA, 2937 bp, Artificial Sequence
  ZCWPW2
ggcgggacggggcggggccgcgggacgccaggaggcggaggcggagtggagttagattcatcccagtagaacgcctgcctctttagtgactacagacctcacttcccttctctggagttttggagtctattttcttcatggaattttgctaggaacaaaagaaaagtctaactccattaaatgccttaatggataaagaaaaattggatgttaagattgaatattgtaactatgcaatggattcctcagtggaaaacatgtatgtaaacaaagtgtgggttcaatgtgagaatgaaaattgtttgaaatggagattgttatcaagtgaggattcagccaaggttgatcatgatgaaccatggtactgcttcatgaacactgattcaagatataataactgctcaatttctgaagaagacttccctgaagagtctcagcttcatcagtgtggatttaagattgtctattcacagctccctcttggaagcctggttttggtaaaattacagaattggccaagttggccaggaatactttgccctgaccgttttaaagggaaatatgtaacttatgacccggatggaaatgttgaagagtatcacatagaattcctgggcgatccccattcaagatcatggataaaggcaacattcgttggacattatagtatcacattaaagccagaaaagtgtaagaataaaaagaagtggtataaaagtgcactacaagaagcatgtctactctatggatattctcatgagcaaagactggaaatgtgctgcctatcaaaactacaagataaatccgaaacacatgacaaagttgctgcactggtcaagaaaaggaagcagacttctaaaaataatattgaaaagaagaagcccaaatttagaaaaaggaaaaggaaagcaattttaaaatgctcttttgaaaatgtttattctgatgatgccttatcaaaggagaacagggttgtctgtgagacggaagttttactaaaagagctggagcaaatgctgcagcaagcactgcaacccacagccacacctgatgaatcagaagaaggacatggagaggaaataaatatgggagaaaagttatctaaatgcagcccagaagctcctgcaggcagtctgtttgaaaaccactatgaagaggactatcttgtaattgatgggataaaattaaaagctggagaatgtattgaggatataactaataaatttaaagaaatagatgctttgatgtctgagttttagaacattatacatttttcaaattaattataaaaatattggcatctttatatttatccaaagttaaaactttaaaaatgtttagtgaaataggtataaattataccaaagtttatatttgcggtaactttctacttcatattttgagaatggccatgatttttagagccagtcaaatggtatttaagttagtgttaaaaatttagaattaaaaaaccctgatatttgtatttatatatttcttgtttgccttaatttttaaatggtttgtgaaatttgcctaacaaacatatgttttacaatgattgtttaggccctttgttcaaaaatggataacttaaaatggctggccaagctattataattctcagaggtaattcaaatctaataaacttagagaatgtatatttgcagtggaatcaaactattacaaaataaaaggaaataattttttaaataattgtttaatagagttgaaacttttcctaaaaagcaaaatttcacttgctacttctactggaatcagttatttcaaccatggtacccaaaactgactgcttaatagagtctctgggagattttggaagatcaaaatcctggacccttccctgctgaatcagtgtctttggaggtatcatcaggaagatggaaaaatgtaatttaaagtgtatagagagaagttaaacatattgattataagaaatctaacaatatagaaagtaaaaactcatcatttttcagggattctcatgaacagttttagtagatatccttctagatatgtgtgggcattcacacctatctttagttcctgctctatctctttctggtggtacggggtggggaaaagggcattccaagcacataaaaaccaaagcttgaggagagaagaagtgcacgagagcatcaccacagcggtgaattttattgtgagttgcctcatattgctttaacaaggaggcagcacatgtctagatattaaaaacaaataagacaccaaacaaccaacgtgtcactcattgagtgggttgcttcttttaagtatttttagattctatgataattacgtagagtggagagtggagatagactcacaacggtgaaatatcttatttgtcaaagtaaagtatgtatgtatttctgtcttccttgttttcctcatgtattccttagcattctgatattgtgtcataggatgttgagttgtaaagcctatctgggttcatattttacatactagcttgtcttaagtcatataaccagtaaatagaaggcctggaagttgagtacatctctgtcaggttccagatcccatgccattgattatcatctataatgtcttgatgaagcttttaactagctgggtggtggaatgataatctagtttcctcatatgtaaaatggggatggaactatgcaaaccaagcactgttgtgaggaataaatgagatattttttgtgaaagtggtttgtaaatcaatttgatcttctgtttactctttgcaaagagaaccaagtatgtgtttaaatatattgcaattaataattactgagataaaatgtaactatacatttgaaatgatcagttttctttctgttatatcatttaatctactactcatcaatatcagagttctttctttctcatttataaaattaatctttggaaaccatcacaagc

SEQ ID NO: 494 - DNA, 9037 bp, Artificial Sequence
  PAK3
tggctgcaggaaccacaagttccagactaggtcgtaattggaataatcacagtcaaaatacacccagatgctctcacacacccagacgcgcgcgcatccccgggccatggggcgcacgtgagcccgcaccccgcgcacccagccctgcctctcgccagagcatcctcagcagctgccaccgaagcagcctcctccttctctcttcctcctcctcctaccacggccgccgccaccaccgctgcggctgtgatctcctatcccctctggtcctccttcctcccccagttcctgctcctcctcccatcccctgctcctcctgcccagcagcgaagggcagaaccctcggctgccgccctccttcgctctgaccaagaagaggctggaacagaataacatacagaggacagctttctcttctgaggagtcagaagttcagttcgcccaacatggaatgacttgaggagctgtgaaattagttgtaactgaaaatgtctgacggtctggataatgaagagaaacccccggctcctccactgaggatgaatagtaacaaccgggattcttcagcactcaaccacagctccaaaccacttcccatggcccctgaagagaagaataagaaagccaggcttcgctctatcttcccaggaggaggggataaaaccaataagaagaaggagaaagagcgcccagagatctctcttccttcagactttgagcatacgattcatgtggggtttgatgcagtcaccggggaattcactggaattccagagcaatgggcacgattactccaaacttccaacataacaaaattggaacagaagaagaacccacaagctgttctagatgttctcaaattctatgattccaaagaaacagtcaacaaccagaaatacatgagctttacatcaggagataaaagtgcacatggatacatagcagcccatccttcgagtacaaaaacagcatctgagcctccattggcccctcctgtgtctgaagaagaagatgaagaggaagaagaagaagaagatgaaaatgagccaccaccagttatcgcaccaagaccagagcatacaaaatcaatctatactcgttctgtggttgaatccattgcttcaccagcagtaccaaataaagaggtcacaccaccctctgctgaaaatgccaattccagtactttgtacaggaacacagatcggcaaagaaaaaaatccaagatgacagatgaggagatcttagagaagctaagaagcattgtgagtgttggggacccaaagaaaaaatacacaagatttgaaaaaattggtcaaggggcatcaggtactgtttatacagcactagacattgcaacaggacaagaggtggccataaagcagatgaaccttcaacagcaacccaagaaggaattaattattaatgaaattctggtcatgagggaaaataagaaccctaatattgttaattatttagatagctacttggtgggtgatgaactatgggtagtcatggaatacttggctggtggctctctgactgatgtggtcacagagacctgtatggatgaaggacagatagcagctgtctgcagagagtgcctgcaagctttggatttcctgcactcaaaccaggtgatccatagagatataaagagtgacaatattcttctcgggatggatggctctgttaaattgactgactttgggttctgtgcccagatcactcctgagcaaagtaaacgaagcactatggtgggaaccccatattggatggcacctgaggtggtgactcgaaaagcttatggtccgaaagttgatatctggtctcttggaattatggcaattgaaatggtggaaggtgaacccccttaccttaatgaaaatccactcagggcattgtatctgatagccactaatggaactccagagctccagaatcctgagagactgtcagctgtattccgtgactttttaaatcgctgtcttgagatggatgtggataggcgaggatctgccaaggagcttttgcagcatccatttttaaaattagccaagcctctctccagcctgactcctctgattatcgctgcaaaggaagcaattaagaacagcagccgctaagactgcaagccttacacctcaccatctccctcatgagtaagactgaaataaaactctgctgcaggaaagatggaagaaaagacagtcaaatggggtgggggttctttacctttcaaatgaatagaaacttcttataagcctttttcctactccctcagattatgtaatttatttgtaagcctgaatcgcagcccaaacagggcagcaatgttgaagtgaccataaagtggtcacttccaccgtgaagcgaaagagccagtagtgaatcccctcattttgtgcattcactttgaagaaaaaggtttctcaaagatgcacactccctcttcatagtgttgtgtttgtttttaagttagagagtagtccctcttgcattcaaacctccttcaaaactccttacccaatgtgatgtttttcacttgcattgtcattagatgtccagaaaaaaaaaagatgtcaaaatgtttttctaaaaaaagaaagcaaaaaaagcaaggcaaaaaaaaaaaaaaaaacaaacaaaaacaaaaacaaaacaaaaacaagcaaacaaaaaataccagagcaagtactgtgtgaacatgtggaagtccatgccctaatagagttgcaattttttattcttcttctatagtggtggcttggtttgtgtacctatttttctgcatttgtattggaaaaggtttcttttaagacattttccaaaagtggagaggaatatgtgtgttcaggaagggctttcaaaaaactgtatatctaaataaagctcaaacggtgaaatcctgtcacattttcacaatgatgcttaaaagataattgagtaaaccaggttgttaatctccttaatacctgaaagaggacacactgaaactgaaactgtgacatcctgctaggtgagttcaggttctgaacctaggaaatcctcataggagaaaccacatttaaacaaagatgggactttctctgagagccaaaaccagataaatgtagaatactgaaatccttgttggacattaagtaaacaaagataatgatacctaaattaatcctctcttgtgcttatgaaacatatgcactgtaaaataggcataccaggaggaaatagatacattaatcatcatttacttatgatacaaattatttattttgacaatttataacgtttaaaaaagttttttaaagatctagagaaaggtgatatagtaaacattcaactctgtaagaaatgggaggtcagtgaaggctacatcccaatcaatatttggctctaagtacctcttcccatttttcctatgtatcacctatttctgtttcggaatatggtgtgttcatgcttagttctttgggcttttgaatatcaaaagcatattcataaatgtcttgaaattctctccagtggaaaataattttaacttacaatcatatcccaagaaatgtcagtccgacagaattccttatatgacttggggaaaataacaaaatttgactactatttcaccatatatctatttattaaaaaattcaacagttggcacttcctgaatcttctgagagtagaaaaatatctgcggagtgtctgtgtagaaaaggatatgcctctcttttgagtgtattgacaattttgtaaattacagaaagttgtttctctaagcctttgaaaaactaacaatttgtgttatagaaggcttcttaatttgcagtataaaagaatctaaacagaacttatgtacattcagccagaaggggaaagagatcagttacataggcctctctccttctttgccaaggtacatccatccatctaaccatccatatatccacatcttaaaatgaaagcactttctttagagtttcagcaaactatatagtgtacgtgtttatgttcaggagatgaccccactggtgtatttcctattttccctattgttttctttgactgtaaaagttgggagaggcttgacctcctccccttgaaaatgtccacagtgggataaaacaacaaatgtgaaaagaaaatgaaacggtaatattaatttgaagcatactatgttatactttgcaaaaacgaatctgggcctgtaatttttaatgccacactgctctaatgagagagagaggccttaattttgatttcatttaaaaataagtactttaaaaaatttttcactcatagtgccgggaaattcaatgaaatcctgggatgcaaataaaaatcagtacattagtgactgtgtcctgccagtggagagagcccaatacctggttaggaagccctattcattagttagcatcccttacatgttgagaaggccttttttttgttgttattttggagaccttggagcagtgacccttcagatcactgtaggcagagaaatggcttctctcttatgctttcagttcagcatattaacaatgaggagccaggtacttctttactaccactttgtaccaagatttgataataatatatcccaggaggcattacttttataaatttgtattcatgtaaattttcaaatgagaacagcttctaaagccccttccctgtattggagagttatgtatatttctaataagtattagaaagaagctgtttctcatgccacagtgatgctgaaggattcacatttggtacaatcgagtaacttgaacgccagattgttaacagtttattctctttccctggatttttaagctcatcttgacacaggtgagtctatccaaatctttgatgttgctagtgtgccctgagataacgagggcacatctttcaatgttgattccaaaatgtcctgagttaggaatagggcagtgggaaagtcagggaagggtgagaagcacagtagagattatttatttaaaaaaggaaagaacgttaatgttgttagcaaggatccagtgcgttgtcataatcccatgaggattttcagatgacacaatcccctcaaatcagtcaccatgttgggtaatgacttcgttcttgctgatctcgtgtgtgtgtcattgtaaatatttgtgtgtccatgttccattttggctactggatggccaagccatgtaagaagatttaactcaagtatttattctttatgttattcagatttctttcaggcttgtgaactgcaccccaatgtttgagtttaaccacctgatccttacatctatccctccccggtgaagcacattccattgctaaaagaaaaagaaacacgaaattgcttcctgttgtctgtataactgttttgatagtttgagatatttgtctataaatgatatttctcagctcaaagatcgtgtaaataattatattcctttgctcaatgggtttatttctaatgaggctgccagttctgagagattctataatatcacttttaaataacataaacagggattacaactatgtaaaaagaaatgcatatggacaaagactgggaacacagataattgaaatcagttgtgttagggtggtggaattatgtgaatttttttttctttttaaaattttatttgatattgttataatattgctttacaataaataaacagcagaaagggaactatagacacatagaaaagatgccagaagcagatgccttctggccagagcgcagagcatgcagggcagagatatttgctagttacaattattccataggctttatgcttgcctgggtgctgaggttggcacacgctcgggtatggcacacgctttcttaggagactattatctataagttaaagctagggagatgtcactattagaactccaaacacactcttctgctttaaaacaggttgtctgccctctgctttggtatggcattcgggtgtctgttttgtggttgctttagattggaggggtgaccattttattagcccccttgataacatctgttgcagatattgcctttctggaacgttttaacagactctcaggttgaattttggaggactagaaggataaaatccccagctcccaccattttcttgtccaacaggatattactgtatatcattcaggtaggattcttcttttaataaccaatagggcaagtcccactaatttcaatagaagttatgacttgcaattaaaagctgactttgaaatcattaaacaaatatgtaggactgtctctgcctgttggcattcagttatagttctgttaattttggcttgggatggtctccatgtgcttttttctgcctatttataggttgtttgcagtagttgtgatttttaaagagcaagggagaccatctaaccaaaggataacttccttctaactcaccaaagaaattttaggtgagaactttaataatgaggtagtcacctcagatatgctgcttagtttcactaaaagcagaccctatacctagagaagtcactggctttttattggtcattctcaatacagaaatacttaggggagtcttaaccctgccatccccggttgaatctcttggtctttatctaagctacttgcagttaatattcagttaagcaaaggtatggccagtagtgcaagtatctcccagtctctgagctctgaacaagaggactgaaattcagcatttgtaaactgacagtttgatgggcctgggatttgaagtgaactcagcacacaattctgaacgtgtatttgcatgtggactgggaaggaaataaatgggaacttggaaataatggaatatttctcctatgaaagaatttttcgtagaagatttgtttttgatataatctttctgttggttagcttttagtgttttcattccttttctgatccacactcctttaagtgaccaaatgaatataacccaacatgcattgggaatgtgtttaatattaaacaatgtctaactgaatctgcaaatgcgggaactgagatatcacctccatgtgcacacctgtgtgtacgagtattctatacaacttgtagcatttactgccacttaattgggttgaacttgcaagataaacttttggaaactgcttagtgccatcggagtctcctttagaagctgccatcaggcaaatgctatcccataataccagcagtaagcctggcaacatgttcaacagatttagtacccaagaggaaatcaacagcgatagtagagaatgagtcagatgtagtgggataaatactagcctaggaagaaggagccccggagtctaatatgagctttattactaaattgctatgtgacgctaggcaagtcacttaacctctccatggctgtttcctcatctgtaaaataagtgtattggactagatgatccttagggtctttccaaaagtctaacattctatggcattataggttgccttgcaaattcagcctgctatagtgatggcaaatatcacgtttaagcctgagtctcttatgttgcagttaaataaaagaactatgtaagatgatttttaaaattcaagcaaatgggccgggtgcggtggctcatacctgtaatcccagcactttgggaggccaaggcaggcggatcacctgaggtcaggagttcgagaccagcctgaccaacatagagaaaccccatctctactaaaaatacaaaattagccgggtgtggtggcgggcgcctgtaatcccagctacttgggaggctgaggtgggagaatcgcttgaacccaggaggcggaggttgtggtgagctgagatcatgccattgcactccagcctcggcaacaagagtgaaacttcgtctccaaaaaaaaaaactcaagcaaatgaagttcataataataggggatgttgataaaacttgtggcagccttccaattcatttacagttgtttcgttttgtttttgttttaatgtccattttctgttgactgttcccagttttcattttccatacagtctgtatgtaaagtctggttttcattaagctgtggccagtatttgccactacaacagaaacacactgtcacacttgctagaatataactgtacttgagcttctcctttcctgtgaagtagtgctgggctttctagagtttaattctcaagtggcacaagatagcagagcccatgcattttaatggctgagactgctaagagtgaacctaaacacttacaagttgcagagagaaatgaaaaagtaattacatgctattagcattgagaaatgttgacaaattaatttgttgggaaccaaagatagcatttctgatgacaactcccacagtgattggccagttgtatgatgagtacactgctggaaagagggtaaactgggagttagtggatggtcccaatgccctgcctacagcagagtgccaaccagccctgagtgcaaaattcaagttcaatgtgtgtgcttgtgtgtggtgtgctttatggacccgcaaataccatattcattattgatgataagatcttcacagaatcctgtagctactaatgcattgagtttttaatctcagtacatcagccaggaggagccagatcacagggtagtgatgtctactgggattatactcataacatctacacaaaacaagttgagaaggatccacgttttcattgtttatcagaattgtatctcatttggctgagcattacttttgtcagaatgtgttatctgtaaaccatgtgtagtgaaattcttctgtaactttggattaaaggtatttatggtctttttgtttgtttgatttttaagtaagttatttcttttgtagacctgctgatggtatggttccatccttctgacctcagcatccaatctttttaaggatttttgttttcaatattgttattttaaattgtggttgaagcaatagaaaattgaaatatggattgtgcatgactgtgtcttgagtgtaaaaatattgcagtttgaaacttggacctaaagtattgcaaataaaaatgacaaacatcaatga

SEQ ID NO: 495 - DNA, 1323 bp, Artificial Sequence
  SCG5
atgcagtctggggagtcctggcgaggcagcttccacctgctggaggaggggccggggcggagctaagatgcggaggagggtgacgcactagctctccagttcgcccgttcctggcctgacccccaccaaggcccataccgcagtaggctcctcgggctgcccctcggttgacaatggtctccaggatggtctctaccatgctatctggcctactgttttggctggcatctggatggactccagcatttgcttacagcccccggacccctgaccgggtctcagaagcagatatccagaggctgcttcatggtgttatggagcaattgggcattgccaggccccgagtggaatatccagctcaccaggccatgaatcttgtgggcccccagagcattgaaggtggagctcatgaaggacttcagcatttgggtccttttggcaacatccccaacatcgtggcagagttgactggagacaacattcctaaggactttagtgaggatcaggggtacccagaccctccaaatccctgtcctgttggaaaaacagcagatgatggatgtctagaaaacacccctgacactgcagagttcagtcgagagttccagttgcaccagcatctctttgatccggaacatgactatccaggcttgggcaagtggaacaagaaactcctttacgagaagatgaagggaggagagagacgaaagcggaggagtgtcaatccatatctacaaggacagagactggataatgttgttgcaaagaagtctgtcccccatttttcagatgaggataaggatccagagtaaagagaagatgctagacgaaaacccacattacctgttaggcctcagcatggcttatgtgcacgtgtaaatggagtccctgtgaatgacagcatgtttcttacatagataattatggatacaaagcagctgtatgtagatagtgtattgtcttcacaccgatgattctgctttttgctaaattagaataagagcttttttgtttcttgggtttttaaaatgtgaatctgcaatgatcataaaaattaaaatgtgaatgtcaacaataaaaagcaagactatgaaaggctcagatttcttgcagtttaaaatggtgtctgaggttgtactattttggccaagtctgtagaaagctgtcatttgattttgattatgtagttcatccagcccttgggcattgttatacaccagtaaagaaggctgtactcaagaggaggagctgacacatttcacttggctgcgtcttaataaacatgaatgcaagcattggcaaaaaaaaaaaaaaaaaaaaaaa

SEQ ID NO: 496 - DNA, 9560 bp, Artificial Sequence
  NRXN1
ctctctctctctctctctctctctctttctttctttccgatggggaagagagggtggtgacaagttagaagcgcttgcggaaggtccccgcccccaggatcaggctccccctgcaaggggacgatgcaaaggtaaaagcacctcgctccgcagcatccagacctggaggggctgcgaccacgggccgagcccacccattccccagccaaaggacgggcccgccgctctccatggtactgcggagagctcagctccgcccttctctttcagaaggacagcacccggcgtcacgtaacccagccttctcaggctccaccaccgccttttccttcccagctctttccctctcctccccctcctcctccttctcctcctcctcctcctcctgctcccctccgttgcctgttctcccctcccgcactcctggagatagacgctcaagcctgacgcctctgaaaaggcagcagcagtcgccttatccatagacctcaggaaattcgctttgaccgatgcatgcttcaggctctggctcgagctgaggggaataaccgggcagatgtctgagtccttaaaaaagacaagataaaaccaaaatgcatcaccaacacacaaccaattgatgtgctggcatcttagcttggccctgcagaggcagagagaaaagaagaggagctgttgcgatttccacatctaacagcttctggctatttcgcaactgctgggtttgagtcctactgttgccgtggctgaaaagagaagtaaaatccaacttgtgagaccacgcacaaggaattaggctttggctgcagcggtgctgaagcccatgctatgacagaagaagcaggcctttgaagctatcctcgggttaagaaatggtgccctaaagaggcaagcatccctttctccgttctgctgtaagacaccacatctgaaggagacagacttgaggcattcacaagcatccaaggatactggctcactgctggcttcctgtactttcttgagaaaagtgttttctttttactgactctcactgcttccttttggcctggtaccactggtggaacctggcagataatgggatttgaggagttaagtatctgttgacactgcagatactcttaaattagttaatcagactcaaatgggtcagtgctttcccttgatcttttgttgaagccttttccagaacgttgtctccaaagtgcatcctccctttggtctggaagttctgtggctaccctgtaccactggggtcaacgttttccagttggaagaggactacagggagagagggcggggttattggaagaagaagaagaaaaaaagaactagataaaggagggcacatccctctcactcccgcctttccccttacctttctgtctctcgggacccttatttcttcgtcacggtgtccaggaccattttgaccctgtcggccccggcacccccccgccgcaccccagccccgagcatggggacggcgctgctccagcgcgggggctgttttcttctgtgcctctcgctgctgctcctgggctgctgggcggagctgggcagcgggctggagtttccgggcgccgagggccaatggacgcgcttccccaagtggaacgcctgctgcgagagcgagatgagcttccagctcaagactcgcagcgcccgcggcctcgtgctctacttcgacgacgagggcttctgcgacttcctggagctgattctgacgcgcggcggccgcctgcagctcagcttctccatcttctgcgctgagcctgcgacgctcctggccgacacgccggttaacgacggcgcctggcacagcgtgcgcatccgccgccagttccgcaacaccacgctcttcatcgaccaggtggaggccaagtgggtggaggtcaagtccaagcgcagggacatgacggtgttcagcggccttttcgtcggggggctgcccccggaactgcgcgccgcggcgctcaagctcaccctggcctcggtgagggagcgggagcccttcaaggggtggattcgtgacgtgagggtcaactcctcgcaggtcctgcccgtggacagcggcgaggtgaagctggacgatgagccgcccaacagcggcgggggaagcccgtgcgaggcgggcgaggagggcgagggcggggtgtgcctcaacggaggtgtgtgctccgtggtggacgaccaggccgtgtgcgactgctcgcgaaccggcttccgcggcaaggactgcagccaagaaataaaattcggtcttcagtgtgttttgccggtgctgttacatgacaatgaccaaggaaaatactgttgtataaatacagcaaagcctctaacagaaaaagacaacaatgtggaaggtctggcgcacctgatgatgggcgaccaaggtaaaagtaaaggaaaagaagaatatattgccacgttcaaaggatctgaatacttctgctacgacttgtctcaaaaccccattcaaagcagcagtgatgaaataactctgtcatttaaaacccttcagaggaatggactgatgcttcacactgggaaatcggctgattatgtcaatcttgccctgaaaaatggagctgtctctctggtcattaatttgggatcaggggcctttgaagcactagtggagcctgtgaatggaaagtttaatgataatgcctggcatgatgtgaaagtcaccaggaatctgcgtcagcactcaggcattggacacgctatggtaaacaaactacattgttcggtgacaatatcagtggatgggattcttaccacaacgggctacacgcaagaagattataccatgctggggtctgatgactttttctatgttggaggcagtcccagcacagccgaccttccagggtcaccagtcagtaacaactttatgggctgtctcaaagaggttgtatataaaaataatgatgtgaggctggaattatctcgacttgccaagcaaggagatcctaagatgaagatccatggagtggtggcatttaaatgtgagaatgttgcaactttagacccaatcacctttgaaaccccagagtctttcatctctttgcctaaatggaatgcaaagaaaactggctccatatcatttgatttccgtacaacagagccaaatggcctcatcttatttagccatggcaagccaagacatcagaaagatgccaagcacccacagatgataaaggtggacttctttgctattgagatgctagatggccacctctacctcctcctggacatggggtcaggtactataaaaataaaagccctgttgaagaaagtgaatgatggagaatggtatcatgtggacttccagagagacggacggtcaggtaccatttctgtcaacacgttgcgtactccctacactgctcctggtgagagtgagattctggacctggatgatgagttgtacctgggggggctgccagaaaataaagctggccttgtcttccccaccgaggtgtggactgctctgctcaactatggctacgtgggctgcatcagggatttgttcatcgatggccaaagcaaagatatccggcaaatggctgaagttcaaagtactgctggagtgaagccttcctgctcaaaggaaacagcaaaaccgtgccttagcaacccttgcaaaaacaatggcatgtgcagggatgggtggaacagatatgtctgtgattgttccggaacaggctatcttggcaggtcctgtgagagagaggcaacggttttgagctatgatgggagcatgtttatgaaaattcagctccccgtagtcatgcatacggaggctgaggatgtttccttacggttccgatcccagcgtgcatatggcattctgatggcaaccacttctagagactctgctgacaccctccgcctggagctagacgcaggacgtgtgaaactgacggtcaatctagattgtatcaggattaactgtaattccagcaaaggtcccgagactctttttgctggctataacctcaatgataacgagtggcacacagtgcgtgtagttcggcgtggaaaaagtttaaagttaacagtggatgaccaacaggccatgacaggtcaaatggcaggtgatcatactaggctggagttccataacatagagactggcatcatcacagaacgacggtatctttcttctgtcccctccaacttcattggacacctgcagagcttgacatttaatggaatggcatacattgacctgtgtaaaaatggcgacatagattactgtgagcttaatgccagatttggcttcaggaacatcatagcagatcctgtcaccttcaagaccaaatcgagctatgttgccttagctaccttgcaagcctacacttctatgcatctttttttccagttcaagacaacatccctagatggattaattctatataacagtggggatggaaatgactttattgtggttgaattagttaaagggtacttacattacgtgtttgatttgggaaatggtgctaacctcatcaaaggaagctcaaataaacctctcaatgacaatcagtggcacaacgtgatgatatcaagggacaccagcaacctccacactgtaaagattgacacaaaaatcacaacgcaaatcaccgccggagccaggaacttagacctcaagagtgacttatatataggaggagtagctaaagaaacatacaaatccttaccaaaacttgtacatgccaaagaaggctttcaaggctgcctggcatcagttgatttaaatggacggcttccggacctcatctccgatgctcttttctgcaacggacagatcgagagaggatgtgaagggcccagcacaacctgccaagaggactcatgttccaatcaaggtgtgtgcttgcaacaatgggatggcttcagctgtgactgtagtatgacttccttcagtggaccactctgcaatgaccctgggacgacatatatctttagcaaaggtggtggacaaatcacgtataagtggcctcctaatgaccgacccagtacacgagcagacagactggccataggttttagcactgttcagaaagaagccgtattggtgcgagtggacagttcttcaggcttgggtgactacctagaactgcatatacaccagggaaaaattggagttaagtttaatgttgggacagatgacatcgccattgaagaatccaatgcaatcattaatgatgggaaataccatgtagttcgtttcacgaggagtggtggcaatgccacgttgcaggtggacagctggccagtgatcgagcgctaccctgcaggaaacaatgataacgagcgcctggcgattgctagacagcgaattccatatcgacttggtcgagtagttgatgaatggctactcgacaaagggcgtcagctcacaatcttcaatagccaagcaaccataataattggcgggaaagagcagggccagcccttccagggccagctctctgggctgtactacaatggcttgaaagttctgaatatggcagccgaaaacgatgccaacatcgccatagtgggaaatgtgagactggttggtgaagtgccttcctctatgacaactgagtcaacagccactgccatgcaatcagagatgtccacatcaattatggagactaccacgaccctggctactagcacagccagaagaggaaagcccccgacaaaagaacccattagccagaccacagatgacatccttgtggcctcagcagagtgtcccagcgatgatgaggacattgacccctgtgagccgagctcaggtgggttagccaacccaacccgagcaggcggcagagagccgtatccaggctcagcagaagtgatccgggagtccagcagcaccacgggtatggtcgttgggatagtagccgctgccgccctgtgcatccttatcctcctctatgccatgtacaagtacagaaaccgggatgaaggctcataccatgtggacgagagtcgaaactacatcagtaactcagcacagtccaatggggctgttgtaaaggagaaacaacccagcagtgcgaaaagctccaacaaaaataagaaaaacaaggataaagagtattatgtctgatcccaagatcttaaatggacacttgtatagaaatagtcttcattttatctgagacataatataaacttatttactttcctttttatgaagcacatacaaaagaagacagggaatgcaatcaggaaggaaagactttttaaaaaataaaaacaagtatctcatgctcttgtttctcaaaaaagaaaaacaaaaaacaaaaaacaggggccaataaattccctaacatccacagtgttttcatttactctgcttgtctttatgttgctggaacatttctaaaagacagtgatgaccgcacgcattcataaagcaaaggagtactacagcatcaaggcacaacacaaaaaccaacacaaaacataacacaaaaaagaagctacctatgatcctggatttagccaaagtgctagcgctttcctgagaagtcagtccaattgccagagaagactgtccttttgagtgactcaacctgcaaacctttaagagtttgccgcctggtgcaactggagcagtggttggaacttgcatttgaaacaaagtgctggcttttttgaagacttgtgtaggaacacattcaaaaagcccctttctggttgtgagagaggaaaaaaaagtatggaggccttattttcaaaaatgtgaaatataaggcacgttttcacacaaaatttcaaaacaaaaacaagagggcatagatgcaatcattgggaaattttcatgcacgcttattatgttattacatatgtttatataaaatccatctctgtgtgctttctggactgtgataagtgacgttttatagcctgttgtatagaaaatgcaaaatatatctctgctcttcagccatttttggtaaattcaatgttataagtgttgctaagtatagggagttttatgacatcagagcaacaattatttcagttgggtttttctttttttttgccaccattataaattgccacaattacttttattttttaaagaaattacagtgtagtgtttattctaaggaagatatgtatgaatgtatatacaaagactcagctacttcttttcttatatgtacagccttcattctgttgcaattaagttttagtacttgtatgaaaggtgtgaattagaaagtcacatatatacatatgtatcttataatcttttctccctgaaatactcacattcccacatacattcactattttcacacacacacacacacacacacacacacacacacacacacacacacgaatccacagcaatccatcagatatgctggaagatccaaacgtgcatacagtagcaaatatttattgacaaattgaaaagcaggaaggaagagggttgtgccaaggtattgatgacaaatggggtgatttgcttcattgagatcttgctcccaggtaaccttaagaagattttagtccctaaagaaatgaacctttccttatcaaatagaatatcactgatatactgctgcatgaataagaaccattatgtgggcaggttatggaagcaaaattggttaatctacaccttaactctggctgctgcaattgaaaactttctttctaataaaataatatatatatctctgaatctgatgtgcatgatgaacatttctggaaagtaaacactttctctcgactaagaaagtatttttcagtaatttttgattctgtattactacccacttaaaaaatcattctctgttaattattgactatgttttaacttttctggttttacatatatatcattaaatatagttttagtttaacacattaagtagtggaaaagtatagattatacacttgttttgcatattattcaatgatgttcacagcaataaattactaatatgagaaggtagtgcaaaaaatgcattattacattgcaagttgatgtttcaggaaaaattggttgcattacttgaataccttctaaaagaacgataaaaaattttgtagaagagaagaatatctttccaattagctttaatcagcaaaggcaaaaaatgcaaaacatcttttgtgatactttagttgatgaaaaaaaagccaagaagtggcctggatttcagacatacagcaccttagaaatatgtataattcatagcaaatcaccactatctatggttgccaagtaattgttgtgtacaaagaaatttagtggctttttatgacccagaaagtagaaggtataaaatgaaaatttaatatccattgcttcttttctagattttcattttttttaatttgccacattaaataattcacgagtcttttcttttcccccgtctcattcagtcttactcagggaaagccagttaaataagaagggaagtgtaaaactactaatttacagcttgaagggtttttttttttaagattgcttttctattttatctattaagcttgaaccagtttccatctggaaagattctaaaatataatagaaaataaattgaataatggtaattttaagcagtatatctatgaaatgtgttgtttgggattgatttcaatgtttctccccagcgtaaattttaaagttacatgcaatgattgatatagtttattatcagcaaaattatttctaatattattggcttacacaaactctagcaaaaattattttttcctcaatggaaaaagaaaagagaggaacagagttagaaagagaaaatgacttgaatcccaagtatcttcataccaaacatatcagggttccctgcatagtttgcagttgattgaggatttcacacgacttggcataaatttgattacatctctagactgtaacttttctgattgattatgcttcttttttatccatgtaatgtgttgccttttttaaaagaacaaatactacaataacgtgtgaagtggtcaatccctaagacatcaaagaaaggccacataaccctacccttctagtgctttgtgtgattgggtatcaaaggggttttcttcttctttttttgtttgtttgtttttctgttgcaaggccaatttatccattattggaaatgctaagcaagtggaatttactgttttgttaataaaatatttcttaatacaactgtgatttattgattttaaaaattatatgcggcaccatttcgtgcttaagtgggaaagtaaagaaggctgcatttgaagggaagacccatccttatattatagaggaagaatgttgactctcttttttctggatttaactagtcattaaagacctctatattcatacacttaaagatgtagccattaaatgtacttttgttatatttgttcatcttgatatgccagaaaccataaactcatacagtattagttgcaaacaatattaaaatactaatttcataaatatgctttttctctataaaagacaatggaatccaagttaagtaaacctgtgattaaattccaacactatcaca

SEQ ID NO: 497 - DNA, 8612 bp, Artificial Sequence
  SCN1A
ttgctgatttgtattaggtaccatagagtgaggcgaggatgaagccgagaggatactgcagaggtctctggtgcatgtgtgtatgtgtgcgtttgtgtgtgtttgtgtgtctgtgtgttctgccccagtgagactgcagcccttgtaaatactttgacaccttttgcaagaaggaatctgaacaattgcaactgaaggcacattgttatcatctcgtctttgggtgatgctgttcctcactgcagatggataattttccttttaatcagaacagcataagaattatttctgagtggaggtgaggcttgtccaaatgtctttgctatcatggatttcctgactcctacctgtttgaggtttgggcaattatgaataaggctgctgtatacatccgtgtgcaggattttgtgtggacataagttttcaactcctttggttaaatcctaaggaatttcatatgcagaataaatggtaattaaaatgtgcaggatgacaagatggagcaaacagtgcttgtaccaccaggacctgacagcttcaacttcttcaccagagaatctcttgcggctattgaaagacgcattgcagaagaaaaggcaaagaatcccaaaccagacaaaaaagatgacgacgaaaatggcccaaagccaaatagtgacttggaagctggaaagaaccttccatttatttatggagacattcctccagagatggtgtcagagcccctggaggacctggacccctactatatcaataagaaaacttttatagtattgaataaagggaaggccatcttccggttcagtgccacctctgccctgtacattttaactcccttcaatcctcttaggaaaatagctattaagattttggtacattcattattcagcatgctaattatgtgcactattttgacaaactgtgtgtttatgacaatgagtaaccctcctgattggacaaagaatgtagaatacaccttcacaggaatatatacttttgaatcacttataaaaattattgcaaggggattctgtttagaagattttactttccttcgggatccatggaactggctcgatttcactgtcattacatttgcgtacgtcacagagtttgtggacctgggcaatgtctcggcattgagaacattcagagttctccgagcattgaagacgatttcagtcattccaggcctgaaaaccattgtgggagccctgatccagtctgtgaagaagctctcagatgtaatgatcctgactgtgttctgtctgagcgtatttgctctaattgggctgcagctgttcatgggcaacctgaggaataaatgtatacaatggcctcccaccaatgcttccttggaggaacatagtatagaaaagaatataactgtgaattataatggtacacttataaatgaaactgtctttgagtttgactggaagtcatatattcaagattcaagatatcattatttcctggagggttttttagatgcactactatgtggaaatagctctgatgcaggccaatgtccagagggatatatgtgtgtgaaagctggtagaaatcccaattatggctacacaagctttgataccttcagttgggcttttttgtccttgtttcgactaatgactcaggacttctgggaaaatctttatcaactgacattacgtgctgctgggaaaacgtacatgatattttttgtattggtcattttcttgggctcattctacctaataaatttgatcctggctgtggtggccatggcctacgaggaacagaatcaggccaccttggaagaagcagaacagaaagaggccgaatttcagcagatgattgaacagcttaaaaagcaacaggaggcagctcagcaggcagcaacggcaactgcctcagaacattccagagagcccagtgcagcaggcaggctctcagacagctcatctgaagcctctaagttgagttccaagagtgctaaggaaagaagaaatcggaggaagaaaagaaaacagaaagagcagtctggtggggaagagaaagatgaggatgaattccaaaaatctgaatctgaggacagcatcaggaggaaaggttttcgcttctccattgaagggaaccgattgacatatgaaaagaggtactcctccccacaccagtctttgttgagcatccgtggctccctattttcaccaaggcgaaatagcagaacaagccttttcagctttagagggcgagcaaaggatgtgggatctgagaacgacttcgcagatgatgagcacagcacctttgaggataacgagagccgtagagattccttgtttgtgccccgacgacacggagagagacgcaacagcaacctgagtcagaccagtaggtcatcccggatgctggcagtgtttccagcgaatgggaagatgcacagcactgtggattgcaatggtgtggtttccttggttggtggaccttcagttcctacatcgcctgttggacagcttctgccagaggtgataatagataagccagctactgatgacaatggaacaaccactgaaactgaaatgagaaagagaaggtcaagttctttccacgtttccatggactttctagaagatccttcccaaaggcaacgagcaatgagtatagccagcattctaacaaatacagtagaagaacttgaagaatccaggcagaaatgcccaccctgttggtataaattttccaacatattcttaatctgggactgttctccatattggttaaaagtgaaacatgttgtcaacctggttgtgatggacccatttgttgacctggccatcaccatctgtattgtcttaaatactcttttcatggccatggagcactatccaatgacggaccatttcaataatgtgcttacagtaggaaacttggttttcactgggatctttacagcagaaatgtttctgaaaattattgccatggatccttactattatttccaagaaggctggaatatctttgacggttttattgtgacgcttagcctggtagaacttggactcgccaatgtggaaggattatctgttctccgttcatttcgattgctgcgagttttcaagttggcaaaatcttggccaacgttaaatatgctaataaagatcatcggcaattccgtgggggctctgggaaatttaaccctcgtcttggccatcatcgtcttcatttttgccgtggtcggcatgcagctctttggtaaaagctacaaagattgtgtctgcaagatcgccagtgattgtcaactcccacgctggcacatgaatgacttcttccactccttcctgattgtgttccgcgtgctgtgtggggagtggatagagaccatgtgggactgtatggaggttgctggtcaagccatgtgccttactgtcttcatgatggtcatggtgattggaaacctagtggtcctgaatctctttctggccttgcttctgagctcatttagtgcagacaaccttgcagccactgatgatgataatgaaatgaataatctccaaattgctgtggataggatgcacaaaggagtagcttatgtgaaaagaaaaatatatgaatttattcaacagtccttcattaggaaacaaaagattttagatgaaattaaaccacttgatgatctaaacaacaagaaagacagttgtatgtccaatcatacagcagaaattgggaaagatcttgactatcttaaagatgtaaatggaactacaagtggtataggaactggcagcagtgttgaaaaatacattattgatgaaagtgattacatgtcattcataaacaaccccagtcttactgtgactgtaccaattgctgtaggagaatctgactttgaaaatttaaacacggaagactttagtagtgaatcggatctggaagaaagcaaagagaaactgaatgaaagcagtagctcatcagaaggtagcactgtggacatcggcgcacctgtagaagaacagcccgtagtggaacctgaagaaactcttgaaccagaagcttgtttcactgaaggctgtgtacaaagattcaagtgttgtcaaatcaatgtggaagaaggcagaggaaaacaatggtggaacctgagaaggacgtgtttccgaatagttgaacataactggtttgagaccttcattgttttcatgattctccttagtagtggtgctctggcatttgaagatatatatattgatcagcgaaagacgattaagacgatgttggaatatgctgacaaggttttcacttacattttcattctggaaatgcttctaaaatgggtggcatatggctatcaaacatatttcaccaatgcctggtgttggctggacttcttaattgttgatgtttcattggtcagtttaacagcaaatgccttgggttactcagaacttggagccatcaaatctctcaggacactaagagctctgagacctctaagagccttatctcgatttgaagggatgagggtggttgtgaatgcccttttaggagcaattccatccatcatgaatgtgcttctggtttgtcttatattctggctaattttcagcatcatgggcgtaaatttgtttgctggcaaattctaccactgtattaacaccacaactggtgacaggtttgacatcgaagacgtgaataatcatactgattgcctaaaactaatagaaagaaatgagactgctcgatggaaaaatgtgaaagtaaactttgataatgtaggatttgggtatctctctttgcttcaagttgccacattcaaaggatggatggatataatgtatgcagcagttgattccagaaatgtggaactccagcctaagtatgaagaaagtctgtacatgtatctttactttgttattttcatcatctttgggtccttcttcaccttgaacctgtttattggtgtcatcatagataatttcaaccagcagaaaaagaagtttggaggtcaagacatctttatgacagaagaacagaagaaatactataatgcaatgaaaaaattaggatcgaaaaaaccgcaaaagcctatacctcgaccaggaaacaaatttcaaggaatggtctttgacttcgtaaccagacaagtttttgacataagcatcatgattctcatctgtcttaacatggtcacaatgatggtggaaacagatgaccagagtgaatatgtgactaccattttgtcacgcatcaatctggtgttcattgtgctatttactggagagtgtgtactgaaactcatctctctacgccattattattttaccattggatggaatatttttgattttgtggttgtcattctctccattgtaggtatgtttcttgccgagctgatagaaaagtatttcgtgtcccctaccctgttccgagtgatccgtcttgctaggattggccgaatcctacgtctgatcaaaggagcaaaggggatccgcacgctgctctttgctttgatgatgtcccttcctgcgttgtttaacatcggcctcctactcttcctagtcatgttcatctacgccatctttgggatgtccaactttgcctatgttaagagggaagttgggatcgatgacatgttcaactttgagacctttggcaacagcatgatctgcctattccaaattacaacctctgctggctgggatggattgctagcacccattctcaacagtaagccacccgactgtgaccctaataaagttaaccctggaagctcagttaagggagactgtgggaacccatctgttggaattttcttttttgtcagttacatcatcatatccttcctggttgtggtgaacatgtacatcgcggtcatcctggagaacttcagtgttgctactgaagaaagtgcagagcctctgagtgaggatgactttgagatgttctatgaggtttgggagaagtttgatcccgatgcaactcagttcatggaatttgaaaaattatctcagtttgcagctgcgcttgaaccgcctctcaatctgccacaaccaaacaaactccagctcattgccatggatttgcccatggtgagtggtgaccggatccactgtcttgatatcttatttgcttttacaaagcgggttctaggagagagtggagagatggatgctctacgaatacagatggaagagcgattcatggcttccaatccttccaaggtctcctatcagccaatcactactactttaaaacgaaaacaagaggaagtatctgctgtcattattcagcgtgcttacagacgccaccttttaaagcgaactgtaaaacaagcttcctttacgtacaataaaaacaaaatcaaaggtggggctaatcttcttataaaagaagacatgataattgacagaataaatgaaaactctattacagaaaaaactgatctgaccatgtccactgcagcttgtccaccttcctatgaccgggtgacaaagccaattgtggaaaaacatgagcaagaaggcaaagatgaaaaagccaaagggaaataaatgaaaataaataaaaataattgggtgacaaattgtttacagcctgtgaaggtgatgtatttttatcaacaggactcctttaggaggtcaatgccaaactgactgtttttacacaaatctccttaaggtcagtgcctacaataagacagtgaccccttgtcagcaaactgtgactctgtgtaaaggggagatgaccttgacaggaggttactgttctcactaccagctgacactgctgaagataagatgcacaatggctagtcagactgtagggaccagtttcaaggggtgcaaacctgtgattttggggttgtttaacatgaaacactttagtgtagtaattgtatccactgtttgcatttcaactgccacatttgtcacatttttatggaatctgttagtggattcatctttttgttaatccatgtgtttattatatgtgactatttttgtaaacgaagtttctgttgagaaataggctaaggacctctataacaggtatgccacctggggggtatggcaaccacatggccctcccagctacacaaagtcgtggtttgcatgagggcatgctgcacttagagatcatgcatgagaaaaagtcacaagaaaaacaaattcttaaatttcaccatatttctgggaggggtaattgggtgataagtggaggtgctttgttgatcttgttttgcgaaatccagcccctagaccaagtagattatttgtgggtaggccagtaaatcttagcaggtgcaaacttcattcaaatgtttggagtcataaatgttatgtttctttttgttgtattaaaaaaaaaacctgaatagtgaatattgcccctcaccctccaccgccagaagactgaattgaccaaaattactctttataaatttctgctttttcctgcactttgtttagccatcttcggctctcagcaaggttgacactgtatatgttaatgaaatgctatttattatgtaaatagtcattttaccctgtggtgcacgtttgagcaaacaaataatgacctaagcacagtatttattgcatcaaatatgtaccacaagaaatgtagagtgcaagctttacacaggtaataaaatgtattctgtaccatttatagatagtttggatgctatcaatgcatgtttatattaccatgctgctgtatctggtttctctcactgctcagaatctcatttatgagaaaccatatgtcagtggtaaagtcaaggaaattgttcaacagatctcatttatttaagtcattaagcaatagtttgcagcactttaacagctttttggttatttttacattttaagtggataacatatggtatatagccagactgtacagacatgtttaaaaaaacacactgcttaacctattaaatatgtgtttagaattttataagcaaatataaatactgtaaaaagtcactttattttatttttcagcattatgtacataaatatgaagaggaaattatcttcaggttgatatcacaatcacttttcttactttctgtccatagtactttttcatgaaagaaatttgctaaataagacatgaaaacaagactgggtagttgtagatttctgctttttaaattacatttgctaattttagattatttcacaattttaaggagcaaaataggttcacgattcatatccaaattatgctttgcaattggaaaagggtttaaaattttatttatatttctggtagtacctgcactaactgaattgaaggtagtgcttatgttatttttgttctttttttctgacttcggtttatgttttcatttctttggagtaatgctgctctagattgttctaaatagaatgtgggcttcataatttttttttccacaaaaacagagtagtcaacttatatagtcaattacatcaggacattttgtgtttcttacagaagcaaaccataggctcctcttttccttaaaactacttagataaactgtattcgtgaactgcatgctggaaaatgctactattatgctaaataatgctaaccaacatttaaaatgtgcaaaactaataaagattacattttttatttta

SEQ ID NO: 498 - DNA, 8168 bp, Artificial Sequence
  ANK2
agtgtggaagaggctggcggatgggctgtcacgtctggctgatctgatgtcagagcagatcatgtggtgctctgtgggcagctgggactggcccgccgaaagcacatggattacagtctgaggctgtaatgggaaagtcggttcctgggctgctgtctcatagacatcagcttgcagggaagctgggggctctccgaattgccctgctccggggcccctcctgctgcgtgactcacaggcacattgcagagagaagctgccgctcccagtaagtaatgaaaagagacatgaagaattggtatttcaaatgaccaccatgttgcaaaagtctgacagcaatgcaagcttcctccgtgctgccagagcaggcaacctggacaaagttgtggaatatctgaaggggggcatagacatcaatacctgcaatcagaatggactcaacgctctccatctggctgccaaggaaggccacgtggggctggtgcaggagctgctgggaagagggtcctctgtggattctgccactaagaagggaaataccgctcttcacattgcatctttggctggacaagcagaagttgtcaaagttcttgttaaggaaggagccaatattaatgcacagtctcagaatggctttactcctttatacatggctgcccaagagaatcacattgatgttgtaaaatatttgctggaaaatggagctaatcagagcactgctacagaggatggctttactcctctagctgtggcactccagcaaggacacaaccaggcggtggccatcctcttggagaatgacaccaaagggaaagtgaggctgccagctctgcatattgccgctaggaaagacgacaccaaatctgccgcacttctgcttcagaatgaccacaatgctgacgtacaatccaagatgatggtgaataggacaactgagagtggttttacccctttgcacatagctgcacattacggaaatgtcaacgtggcaactcttcttctaaaccggggagctgctgtggacttcacagccaggaatggaatcactcctctgcatgtggcttccaaaagaggaaatacaaacatggtgaagctcttactggatcgaggcggtcagatcgatgccaaaactagggatgggttgacaccacttcactgtgctgcacgaagtgggcatgaccaagtggtggaacttctgttggaacggggtgcccccttgctggcaaggactaagaatgggctgtctccactacacatggctgcccagggagaccacgtggaatgtgtgaagcacctgttacagcacaaggcacctgttgatgatgtcaccctagactacctgacagccctccacgttgctgcgcactgtggccactaccgtgtaaccaaactccttttagacaagagagccaatccgaacgccagagccctgaatggttttactccactgcacattgcctgcaagaaaaaccgcatcaaagtcatggaactgctggtgaaatatggggcttcaatccaagctataacagagtctggcctcacaccaatacatgtggctgccttcatgggccacttgaacattgtcctccttctgctgcagaacggagcctctccagatgtcactaacattcgtggtgagacggcactacacatggcagcccgagccgggcaggtggaagtggtccgatgcctcctgagaaatggtgcccttgttgatgccagagccagggaggaacagacacctttacatattgcctcccgcctgggtaagacagaaattgtccagctgcttctacaacatatggctcatccagatgcggccactacaaatgggtacacaccactgcacatctctgcccgggagggccaggtggatgtggcatcagtcctattggaagcaggagcagcccactccttagctaccaagaagggttttactcccctgcatgtagcagccaagtatggaagcctggatgtggcaaaacttctcttgcaacgccgtgctgccgcagattctgcagggaagaacggccttaccccgctccatgttgctgctcattatgacaaccagaaggtggcgctgctgttactggagaagggtgcttcccctcatgccactgccaagaatggctatactccgttacatattgctgccaagaagaatcaaatgcagatagcttccacactcctgaactatggagcagagacaaacattgtgacaaagcaaggagtaactccactccatctggcctcgcaggaggggcacacagatatggttaccttgcttctggataagggagccaatatccacatgtcaactaagagtggactcacatccttacaccttgcagcccaggaagataaagtgaatgttgctgatattctcaccaagcatggagctgatcaggatgctcatacaaagcttggttacacacctttaattgtggcctgtcactatggaaatgtgaaaatggtcaactttcttctgaagcagggagcaaatgttaacgcaaaaaccaagaacggctacacgcctttgcaccaggccgctcagcagggtcacacgcacatcatcaacgtcctgctccagcatggggccaagcccaacgccaccactgcgaatggcaacactgccttggcgattgctaagcgtctgggctacatctccgtggtcgacaccctgaaggttgtgactgaggaggtcaccaccaccaccacaactattacagaaaaacacaaactaaatgtacctgagacgatgactgaggttcttgatgtttctgatgaagagggtgatgacacaatgactggtgatgggggagaataccttaggcctgaggacctaaaagaactgggtgatgactcactacccagcagtcagttcctggatggtatgaattacctgcgatacagcttggagggaggacgatctgacagccttcgatccttcagttccgacaggtctcacactctgagccatgcctcctacctgagggacagtgccgtgatggatgactcagttgtgattcccagtcaccaggtgtcaactctagccaaggaggcagaaaggaattcttatcgcctaagctggggcactgagaacttagacaacgtggctctttcttctagtcctattcattcaggccgcgcctctccatgtcttgaacgtgacaacagcagtttcctggttagttttatggtggatgcccgaggtggtgctatgcgaggatgcagacacaatgggctccgaatcattattccacctcggaaatgtactgctccaacgcgagtcacctgccgactggtcaagcgccacagactggcaacaatgcctccaatggtggaaggagaaggcctggccagtcgcctgatcgaagttggaccttctggtgctcagttccttggtaaacttcacctgccaacggctcctcccccacttaatgagggagaaagtttggtcagccgcattcttcagctggggcctcctggaaccaaattccttgggcctgtgatcgtggagatccctcactttgcggcccttcgaggaaaggaaagggaactggtggtcctgcgcagtgagaatggggacagctggaaagagcatttctgtgactacactgaagatgaattgaatgaaattcttaacggcatggatgaagtactggatagcccagaagacctagaaaagaaacgaatctgccgcatcatcacccgagacttcccacagtactttgcagtggtgtctcgtatcaaacaggacagcaatctgattggcccagaaggaggtgtactgagcagcacagtggtgccccaggtgcaggccgtcttcccagagggggcactcaccaagcggatccgcgtaggcctgcaggctcaacctatgcacagtgagctggttaagaagatcctaggcaacaaagctaccttcagccctatagtcactttggaacctagaagaagaaaattccacaaaccaattaccatgaccattcctgtccccaaagcttcaagtgatgtcatgttgaatggttttgggggagatgcaccaaccttaagattactatgcagcataacaggtggaaccacccctgcccagtgggaagatattacaggaactacgccattaacatttgtcaatgaatgtgtttcctttacaacaaacgtgtctgccaggttctggctgatagattgtcgacagatccaggaatccgttacttttgcatcacaagtatacagagaaattatctgcgtaccttatatggccaaatttgtagtgtttgccaaatcacatgaccccattgaagccaggttgaggtgtttctgcatgactgatgataaagtggataagacccttgaacaacaagaaaattttgctgaggtggccagaagcagggatgtggaggtgttagaaggaaaacccatctacgttgattgtttcggcaacttggtaccattaactaaaagtggccagcatcatatattcagtttttttgccttcaaagaaaatagacttcctctatttgtcaaggtacgcgatacgactcaggaaccttgcggacgactatcatttatgaaggagccaaaatccacgagaggcctggtgcatcaagctatttgcaacttaaacatcactttgccgatttatacaaaggaatcagagtcagatcaagaacaggaggaagagatcgatatgacatcagaaaaaaatccacaggatgagcaggaacggatcgaggaaaggctggcttatattgctgatcaccttggcttcagctggacagaattagcaagagaactggatttcactgaggagcaaattcatcaaattcgaattgaaaatcccaactctcttcaagaccagagtcatgcactgttgaagtactggctagagagggatgggaaacatgctacagataccaacctcgttgaatgtctcaccaagatcaaccgaatggatattgttcatctcatggagaccaacacagaacctctccaggagcgcatcagtcatagttatgcagaaattgaacagaccattacactggatcatagtgaagggttctcggtacttcaagaggagttatgcactgcacagcacaagcagaaagaggagcaagctgtttctaaagaaagtgagacctgcgatcaccctcctatcgtctcagaggaagacatttctgttggttattccacttttcaggatggcgtccccaaaactgagggggacagctcagcaacagcactctttccccaaactcacaaggagcaagttcaacaggatttctcagggaaaatgcaagacctgcctgaagagtcatctctggaatatcagcaggaatattttgtgacaactccaggaacagaaacatcagagactcagaaggctatgatagtacccagctctcccagcaagacacctgaggaagttagcacccctgcagaggaggagaagctgtacctccagaccccaacatccagcgagcggggaggctctcccatcatacaagaacccgaagagccctcagagcacagagaggagagctctccgcggaaaaccagcctcgtaatagtggagtctgccgataaccagcctgagacctgtgaaagactcgatgaagatgcagcttttgaaaagggagacgatatgcctgaaatacccccagaaacagtcacagaagaagaatacattgatgagcatggacacaccgtggtaaagaaggttactaggaaaatcattaggcggtatgtatcctctgaaggcacagagaaagaagagattatggtgcagggaatgccacaggaacctgtcaacatcgaggaaggggatggctattccaaagttataaagcgtgttgtattgaagagtgacaccgagcagtcagaggacaacaatgagtaaagccatcacacagaagagggctgtggtgaaggaccagcatggaaaacgcattgacttggagcacctggaggatgtaccagaagcactagaccaggacgacctccagcgcgatctccagcagctccttcggcatttctgcaaggaggacttgaagcaagaggccaagtgaggggctgcccagttctcacaccagaaaccacacattcactcaatatgcagcttcctgtttcagtaggggagtgacctaactggcctaattaatgggataccccgacatttccactgttagcaaatatacggcattttgctttagttttcccccatcctctttaactataaagctaatttgtgaccaaagatggcatccttcatactggatgctgtatccaatactttgttgtgtctgtgctaacctgggaactggccacctccattgttctttgcttctgcacaagatccatgaaaatccattgatcagaagaacttcacctgcagacctcttcaagtgacactatgtaggaatccttccaaggaatatctatgtacaatgtatatagctgaaatgctcagatgaacaacatattaaaattaaaaccactgcctattgtaactacactgggcatcagaataaaaggcctctagaaattgctgaacaatggttaattaagatattgctaacacaatcgagtgataatacagttttactgcaaaagaagcacttcaaacctattatgtccttagaacttccagagtagccactgctcccagttaaaggtgggtcagtagccttgcagaactgtcctgagaagttattgctggtgctggccagccatggcttaggactccaacagccactctgagggaggggagaagggagcagaggccacgcagaatgaaccgatggggtattcagttgctggcagctacattgtgtggcattctagcatcttcaggtctttagatcttggacaagttggcagggtattttaaaagctataactactgtagttttccagttttcattgctgctttagcaaaccacgctgtcttacagtggtactttcttctggccactgcactgtagataattcattggaaacaagatttacccactacataaaaggttaaactccttcagtatgttggagtggtttctttttttttttctttctttcttttttttcttcaggtttatatcttctctaatacctgcatgtggcgtttaaaaatcaagaccacggtcaaacccctcttctaatcacattaattgtttccattctttttaccctgagtgagcacttttcactttccagctaggtctgtttttcagcttgcagacaagattgagaaatccttgaaaatttggttttggttaaaatttttggtttatttatttgaaatccacactcccttggaaactcttaagtgcatttgtgcacttctgtttgtttgtctcaaagaagggactgtaacaatctgagtaatttccatgtcctcttccttattcctctagtggttgaagctgtgtagcattttaacatatatatattcacaaatatattcatataaacagtatacattttgaatcagtcatttgttaaagaaaagtatattcaatgaagatgaaatttaaataaaaaaggacagagtctatcctccagggattgaacattttccaattatctggtcttttcctgttgtgcaaaaatgactcattgctccgaatgtcaaaaacaaatgcgacaaacaatggcacttcatcatttaaagtaatgttgccaagagaaaaaatttcctgggagggaggtttcccacaagccaaatctcctaagcctcaaatgctagcactttttggcagttggataggaaatgagacattctttggcagccaaaataagagaggccgatggtgaaactttttgagacaccctatggccttcttgtcaaaaccttcactggagctcaagaaaagcatttctgttgtgttatttgcagtgcagatgatgtctgtgtaacaacataatggttattcacctttttttgattttgatttttgctgtgttatcaaaaacttgaatactgtgagaagaagtgaattttcagttgacgaatcagcatcttgttcccatggtgataacactaattgaatatatctatgagggcatgtattagttaatggaaaaaaaaatacaacactaacaatacatagctgcaatgtgtacaatggctgatttaattaaataaaatgtacaagtgttaaatgtggcaa

SEQ ID NO: 499 - DNA, 8947 bp, Artificial Sequence
  RC3H2
aggtccgcctccgtggtgaggaggaggaggaggaggaggcggaggtggagggaggaggaggaggccccgtcgcggccttcgccgccgccaacggggctgtccctgtagctcccgatggagtttgaggtcgtgaaacctccgccgagctctgccccggcgagacgaggcgcctccgtcgccaagccgcgccgtcgcggggctcccgggagcggcccttagcgaccccgcccgggccccctcagcttacaaaacactacacagcaaaataatgatctgctagactgctaacccgagcatccagcttccacaatgcctgtgcaggcagctcaatggacagaatttctgtcctgtccaatctgctataatgaatttgatgagaatgtgcacaaacccatcagtttaggttgttcacacactgtttgcaagacctgcttgaataaacttcatcgaaaagcttgtccttttgaccagactgccatcaacacagatattgatgtacttcctgtcaacttcgcacttctccagttagttggagcccaggtaccagatcatcagtcaattaagttaagtaatctaggtgagaataaacactatgaggttgcaaagaaatgcgttgaggatttggcactctacttaaaaccactaagtggaggtaaaggtgtagctagcttgaaccagagtgcactgagccgtccaatgcaaaggaaactggtgacacttgtaaactgtcaactggtggaggaagaaggtcgtgtaagagccatgcgagcagctcgttcccttggagaaagaactgtaacagaactgatattacagcaccagaaccctcagcagttgtctgccaatctatgggccgctgtcagggctcgaggatgccagtttttagggccagctatgcaagaagaggccttgaagctggtgttactggcattagaagatggttctgccctctcaaggaaagttctggtactttttgttgtgcagagactagaaccaagatttcctcaggcatcaaaaacaagtattggtcatgttgtgcaactactgtatcgagcttcttgttttaaggttaccaaaagagatgaagactcttccctaatgcagctgaaggaggaatttcggagttatgaagcattacgcagagaacatgatgcccaaattgttcatattgccatggaagcaggactccgtatttcacctgaacagtggtcctctcttttgtatggtgatttggctcataaatcacacatgcagtctatcattgataagctacagtctccagagtcatttgcaaagagtgtccaggaattgacaattgttttgcaacgaacaggtgacccagctaacttaaatagactgaggcctcatttagagcttcttgcaaacatagaccctaatccagacgctgtttcaccaacttgggagcagctggaaaatgcaatggtagctgttaaaacagtagttcatggccttgtggacttcatacaaaattatagtagaaaaggccatgagacccctcagcctcagccaaacagcaaatacaagactagcatgtgccgagatttgcgacagcaagggggttgtccacgaggaacaaattgtacatttgcccattctcaggaagagcttgaaaagtatcgattaaggaacaaaaagatcaatgccactgtaagaacgtttcctcttctaaataaagttggtgtaaacaacactgtcacaaccacagccggaaatgtcatttctgtcataggaagtactgaaacaacagggaaaattgttccaagtacaaacggaatttcaaatgcagaaaacagtgtttcccagctaatctcacgtagtactgacagtaccttaagagctctggagaccgtgaagaaagtgggaaaggttggcgctaatggtcagaatgctgctgggccctctgcagattctgtaactgaaaataaaattggttctccacccaagactcctgtaagtaatgtagcagctacctcagctgggccctctaatgttggaacagagctgaattctgtgcctcaaaaatccagcccatttctaactagagtaccagtatatcctccgcattctgaaaacattcagtattttcaagatccaaggactcagataccctttgaagtcccacagtacccacagacaggatactatccaccacctccaacggtaccagctggtgtggctccctgtgttcctcgctttgtgaggtccaataacgttccagagtcctccctcccacctgcttccatgccatatgccgatcattacagtacattttcccctcgagatcgaatgaattcttctccttaccagcctcctcctccgcagccgtatggaccagttcctccagtaccttctggaatgtatgctcctgtgtacgacagcaggcgcatctggcgcccacctatgtaccaacgagatgacattattagaagcaattctttacctccaatggatgtgatgcactcatctgtctatcagacatctttgcgggaaagatataactcattagatggatattattcggtggcttgtcagccaccaagtgagccaaggacaactgtgcctttaccaagggaaccttgtggtcatttgaagaccagttgcgaggagcagataagaagaaagccagatcagtgggcacagtaccacactcagaaagcacctcttgtctcttcaactcttcctgtggcaacacagtcaccaacaccaccttctcctctgttcagtgtagactttcgtgcggatttctcagagagtgtgagtggtacaaaatttgaagaagatcatctttcccattattctccctggtcttgtggcaccataggctcctgtataaatgccattgattcagagcccaaagatgtcattgctaattcaaatgctgtgttaatggacctggacagtggtgatgttaagagaagagtacatttatttgaaacccagagaaggacaaaagaagaagatccaataattccctttagtgatggacccatcatctcaaaatggggtgcgatttccagatcttcccgtacaggttaccataccacagatcctgtccaggccactgcttcccaaggaagtgcgactaagcccatcagtgtatcagattatgtcccttatgtcaatgctgttgattcaaggtggagttcatatggcaacgaggccacatcatcagcacactatgttgaaagggacagattcattgttactgatttatctggtcatagaaagcattccagtactggggaccttttgagccttgaacttcagcaggccaagagcaactcattacttcttcagagagaggccaatgctttggccatgcaacagaagtggaattccctggatgaaggccgtcaccttaccttaaaccttttaagcaaggaaattgaactaagaaatggagagttacagagtgattatacagaagatgcaacagatactaaacctgatagggatatcgagttagagctttcagcacttgatactgatgaacctgatggacaaagtgaaccaattgaagagatcttggacatacagcttggtatcagttctcaaaatgatcagttgctaaatggaatggcagtggaaaatgggcatccagtacagcagcaccaaaaggagccaccaaagcagaagaaacagagtttaggtgaagaccatgtgattctggaggagcaaaaaacaattctgccggtaacttcttgctttagccagccactcccagtgtctattagcaatgcaagttgcctccccatcaccacatctgtcagtgctggcaacctcattctgaaaactcatgttatgtctgaagataaaaacgactttttaaaacctgttgcaaatgggaagatggttaacagctgaaaggaggttcatctttcaaatttgtgaccacaccatggaagcatttacactagctttttatatatataatatatattatataatgtatattttttttaaaaaaaagatattactgggggcatccatttcctgtggactctttgatacttcaagccctcttgcattagcattatgaaaaaaaaaaagaaaatttactttactagggtaacatgttcactttccagaaatgattggaatttggacaacatttaacttaagcttcaagcagctttttatgagtttgtagcaatccggtgcagtaactgagccatttcctattttaaatggcttctatagaaaattaacaactcagttattaaactagcaggatcctacaatgatacatctagtgaaagtagacttagttaacttatttatttctattttatgtttcactgagagaagtttccatctcattccagctgctttatttatctttttcatggaactttgcatggatttctttttctttttttaattttgaagagtggagttagatgttcttaccatagaattttacagggttatatactagcattctttactgcattatatgtaggagtgtggtgcagtgcttttatctgtagcatataatttttttttaattttccatttttcaagagtagtttctgctttgttaatatttatacacaggctacttgttgaagtaattaattaaaaatataaccaagtgcctaagtctttcagctgatgtactagatattaaattctcctaagttatgcagaatcgtttttacaattttgataaattatgcactaatgtaatggcagttttttaaaatgcagatttaagcctgtacattattgaatctgatgacttggcaaaagaatcaggtgctttcagctttcttgagaaaaccctgtatgtagcgtttgcactgactaacaagatggtattgctgggtttttaatttaaactaattaatttggttgttcattgcattatcttggttaaatattgtttattgttacttcatgttggggtttagtttttcttgttttttgactgttaggttgataagactatgaactgtgtaatagtagaacagtggctaacatttattcatacttaagaacatgaataatttctgccttgctaaaatgtgactgaaatggttttgacttggcatctgaaagtatacaatgtgttcaacaagtcatgcatcagatttgtgggaggtattgtactgaaacctaaatttcagtcaacatttgaaaagaagagctgggcattccttcctggtgatctttacctatagtttatctatctgtttttcttctgtttctttaagattagtttgacttttattattatttttttaattaacttctgtgaagttgtttactctgaaaattgtactggaatattttaagccaagctgatctttcaccaggtgtactgtatgtaagggcttttcctgctagcaagatgcttaaacaggatcatgttattggtcgtctgagctatttagttgttttacaaaaccacagcattgtatcagataagattttgataaaaagttttgtgcacatttccaggggcgggagggttgacatttccctgaaatttcttgattagaatgagtaaatactggtgtttgatacctgtcttaatgaacatgctcataaggtgactgataagttgtaaatatacctgagaaacaaaggggtagttttgatattctggtgtcagtatggaagatcttacacatttatttaatactcaaatgtatgaagatgtttgtttgtagcataacaacagcacagtagccttgacttagtttcctttggttagtactgtaccttttttgccatggccagtgctccccatccctatgaagacattttatttatttcactctgtaacctgaaatgaataggaacaagggttttaaaccatgttacattaacttttctgacattataaattagcctagaatattacaggaacatgattgttatataatttatatcagaacctttctataaatatgtgcttattacatttgaaatgcttccaatgtactttatttgctgtttgtaattccaaaaaggatatgcaaaccagtctgtctatttcatggatatttaatagtgagatcttccatgttgaaggtaatgtatttttttttaagattttaaaattgctattttgttacaaaatagagacctattaacagtttgagagctccttatgtgccctcagggaaagaaccctctgtgcaacagaactacacaaaacatcttcagcacgttctgagggtgaatatatactacataaattgatcttgtgtatttaaccttatctttttaattttaaaattgaaattttgaaacttggttgtgctctgctggagggggttgggataaactgcttagatgtttgcctacttgtccagtgaaattacatttgcatcagtatatgtatatacctgccaaccttattggtatgtctcagaacatttatattaaaataatgcttgtcttgcagcaggtgatcccataaaacaataactccctgttcttaaaaacttactctctttttcactaacaacataggaattgtttctgtgttgagattattctgtgttgcatccattctctatgtagtggtcaccttctgtctgtcatggtgggcttaatgtgaagtaaagccattggttctctgccactttcgaagaaagggcagttcatctgatccttcttcagaatggtacctactgatatcatcgaggaaaatgttacaaatcagacctaggatatgactttttaaaattgaggcatttcccgtcatttggcctttttaccaacaagatgtgatgtacaaatttggaatcaaaggatacaaagcaacaagagaggaaatgtgtaatgtgggtaaccaaactgcatatgttacctattgtctaatcagaaaaaatagtctgaggtctggaaagcaggaaagtggtggttattttctttcattttttgtgtttttgttttttaatttctaagttccattctgaaatccatgtgccgcattcagttactgtggttgtagcatcagtttttttgtggtttcatttcattttatgaattcagaggaagttacatatatattttttctagttggtacctgaacaaagcagattcccttgcctttgctgccacgtcttattttcaatgccatgtgataaaccagtgtcatacatgaaagttgtgcattgtaattttcaaaaaaaagggagttcattaggccagtggcactgatttttccttcccatcatagctatttattctagtaagaggataataaaagaaatttcctatacaagaactgaaattttccatttgtatggatctagtcactttcagatttcaatttgaggttaagtatataaagcacatcccaattttatatgctgccttgagaaaattacaggatgcacggcaatttgtaggaatttcaaatgggatcatttaaacatttgaaaaattattttaaaaaccatctagtttgcttttggattttagacattaaagcctatgttgtcttgttaacaggggtggaatgtataaccatcagattcagcatgtgatttcacctttgaatctgagtatttcttccctatcttctttgagtcatttttggagcagactgtcaccagtattgataactaagcattaaagggaaaagttgcattgcaactatgcattggtttcctggaagaacttttcttttgttttagtgaatgaagaggcttgatgggatcacttactgtaactccttctacataaggaccccttctgcaagcagaacacaaaagaacatgctcaaggagtatcccattttctggataaattgaagaagtttgctagtaatgtctttatactagcgtcttccttgtatccctttgctggcaagggaatacaaggcgtcaagaccacagatcaaaacaccccacatttgagtggagtcttatttttactccaagagcagttattcccttctagtctaaaattggcagttttttcttttttttaataaaatttttaaaatattcccaaaccagtggaacacagacactggctgcacttagtactgccaaaagccaaggtcatttgcacatattccatcaacctgtcgagaattaggcctcactttataacccaaggcatggaagtgcatgcattctcttagctgggcaaacaattatactgtagttgtgatacaacacatgtggcttttatttgtactgcacatatccactgtacagccacttgggagtatcgtggttagcttgcagcaactgctgtctgcatttatactgtttattgcatattcttttccctggaagtgaaagagaaatgtttttcttgttgcattgattacattttataaatttgcttagctggaaagtttgggaaaagaggcctgtttgtcaattgtacaaccgattgtgaagctctagtgtgaatatttttacgtctgtattagacattttctttgcaaatctattgttcgattgaaatgtaaatgaaattaaagatggtgtacacccatcatgtaaaaagcaggcaccatctctaagatggatttaatgctcatttttaaggcatatactcagcttctatttaaaactataatttaaaataattctgtacaatgaaatggggaatatatatgggaataaattctattccatttatttcaatttgaatttccaaattgtaatgtttccctttgtgctataggaataggattaaatgggggaagactaggatttataaggcctgtatatggggggagggcagagatggaacaatgagggttgtgatgatagtgaatagcaaagagtgaattctgtgtgtttttgctgtagcactgaagtgaagagatattagctttggctgttcacaaaatagagcatcatgattttcagtgtttgagagaaaattgatggaaaaagtttgcagtacttgacatgtatttgcatgcacaaaataaaattatttgtcc

SEQ ID NO: 500 - DNA, 113 bp, Artificial Sequence
  Homo sapiens
tcactgttctgcttgctataaaagacagcaatgagcaaataatactcctctgttctcaagaagatcacattttaatgaaaagagacagactatgaaaaaataaattgtgtcag

SEQ ID NO: 501 - DNA, 241 bp, Artificial Sequence
  C8orf8gene
gtcccaccttacctggaagaaccatgaagatcaaatagaaggtccttgtgcatgaagctcagcggaaaaaagctcggatgtaggggttggagacagttgtcgctcaaggtgcaaactccgggctggcgctgtgtgtgaacagataacaacaaaatgtatgtggctgagtccactaggaagacgcttctgtaccacatggagttctctgaattaacttccagatatattaaaattattaatg

SEQ ID NO: 502 - DNA, 360 bp, Artificial Sequence
  Homo sapiens
cagatcaccttgaaggagtctggtcctacgctggtgaaacccacacagaccctcacgctgacctgcaccttctctgggttctcactcagcactagtggagtgggtgtgggctggatccgtcagcccccaggaaaggccctggagtggcttgcactcatttattgggatgatgataagcgctacagcccatctctgaagagcaggctcaccatcaccaaggacacctccaaaaaccaggtggtccttacaatgaccaacatggaccctgtggacacagccacatattactgtgcacacagactaaggggttttggggcttttgatatctggggccaagggaccacggtcaccgtctcgagc

SEQ ID NO: 503 - DNA, 583 bp, Artificial Sequence
  HBG2
acactcgcttctggaacgtctgaggttatcaataagctcctagtccagacgccatgggtcatttcacagaggaggacaaggctactatcacaagcctgtggggcaaggtgaatgtggaagatgctggaggagaaaccctgggaaggctcctggttgtctacccatggacccagaggttctttgacagctttggcaacctgtcctctgcctctgccatcatgggcaaccccaaagtcaaggcacatggcaagaaggtgctgacttccttgggagatgccataaagcacctggatgatctcaagggcacctttgcccagctgagtgaactgcactgtgacaagctgcatgtggatcctgagaacttcaagctcctgggaaatgtgctggtgaccgttttggcaatccatttcggcaaagaattcacccctgaggtgcaggcttcctggcagaagatggtgactggagtggccagtgccctgtcctccagataccactgagctcactgcccatgatgcagagctttcaaggataggctttattctgcaagcaatcaaataataaatctattctgctaagagatcac

SEQ ID NO: 504 - DNA, 585 bp, Artificial Sequence
  PLA2G1B
tggtcatctcagttcttttctcaccttgactgcaagatgaaactccttgtgctagctgtgctgctcacagtggccgccgccgacagcggcatcagccctcgggccgtgtggcagttccgcaaaatgatcaagtgcgtgatcccggggagtgaccccttcttggaatacaacaactacggctgctactgtggcttggggggctcaggcacccccgtggatgaactggacaagtgctgccagacacatgacaactgctatgaccaggccaagaagctggacagctgtaaatttctgctggacaacccgtacacccacacctattcatactcgtgctctggctcggcaatcacctgtagcagcaaaaacaaagagtgtgaggccttcatttgcaactgcgaccgcaacgctgccatctgcttttcaaaagctccatataacaaggcacacaagaacctggacaccaagaagtattgtcagagttgaatatcacctctcaaaagcatcacctctatctgcctcatctcacactgtactctccaataaagcaccttgttgaaagacctcaaaaaaaaaaaaaaaaaaaaa

SEQ ID NO: 505 - DNA, 1616 bp, Artificial Sequence
  SPP1
ctccctgtgttggtggaggatgtctgcagcagcatttaaattctgggagggcttggttgtcagcagcagcaggaggaggcagagcacagcatcgtcgggaccagactcgtctcaggccagttgcagccttctcagccaaacgccgaccaaggaaaactcactaccatgagaattgcagtgatttgcttttgcctcctaggcatcacctgtgccataccagttaaacaggctgattctggaagttctgaggaaaagcagctttacaacaaatacccagatgctgtggccacatggctaaaccctgacccatctcagaagcagaatctcctagccccacagacccttccaagtaagtccaacgaaagccatgaccacatggatgatatggatgatgaagatgatgatgaccatgtggacagccaggactccattgactcgaacgactctgatgatgtagatgacactgatgattctcaccagtctgatgagtctcaccattctgatgaatctgatgaactggtcactgattttcccacggacctgccagcaaccgaagttttcactccagttgtccccacagtagacacatatgatggccgaggtgatagtgtggtttatggactgaggtcaaaatctaagaagtttcgcagacctgacatccagtaccctgatgctacagacgaggacatcacctcacacatggaaagcgaggagttgaatggtgcatacaaggccatccccgttgcccaggacctgaacgcgccttctgattgggacagccgtgggaaggacagttatgaaacgagtcagctggatgaccagagtgctgaaacccacagccacaagcagtccagattatataagcggaaagccaatgatgagagcaatgagcattccgatgtgattgatagtcaggaactttccaaagtcagccgtgaattccacagccatgaatttcacagccatgaagatatgctggttgtagaccccaaaagtaaggaagaagataaacacctgaaatttcgtatttctcatgaattagatagtgcatcttctgaggtcaattaaaaggagaaaaaatacaatttctcactttgcatttagtcaaaagaaaaaatgctttatagcaaaatgaaagagaacatgaaatgcttctttctcagtttattggttgaatgtgtatctatttgagtctggaaataactaatgtgtttgataattagtttagtttgtggcttcatggaaactccctgtaaactaaaagcttcagggttatgtctatgttcattctatagaagaaatgcaaactatcactgtattttaatatttgttattctctcatgaatagaaatttatgtagaagcaaacaaaatacttttacccacttaaaaagagaatataacattttatgtcactataatcttttgttttttaagttagtgtatattttgttgtgattatctttttgtggtgtgaataaatcttttatcttgaatgtaataagaatttggtggtgtcaattgcttatttgttttcccacggttgtccagcaattaataaaacataaccttttttactgcctaaaaaaaaaaaaaaaaaaaaaaaaaaaaaaaaaa

SEQ ID NO: 506 - DNA, 1485 bp, Artificial Sequence
  KRT18
tccggggcgggggcggggcctcactctgcgatataactcgggtcgcgcggctcgcgcaggccgccaccgtcgtccgcaaagcctgagtcctgtcctttctctctccccggacagcatgagcttcaccactcgctccaccttctccaccaactaccggtccctgggctctgtccaggcgcccagctacggcgcccggccggtcagcagcgcggccagcgtctatgcaggcgctgggggctctggttcccggatctccgtgtcccgctccaccagcttcaggggcggcatggggtccgggggcctggccaccgggatagccgggggtctggcaggaatgggaggcatccagaacgagaaggagaccatgcaaagcctgaacgaccgcctggcctcttacctggacagagtgaggagcctggagaccgagaaccggaggctggagagcaaaatccgggagcacttggagaagaagggaccccaggtcagagactggagccattacttcaagatcatcgaggacctgagggctcagatcttcgcaaatactgtggacaatgcccgcatcgttctgcagattgacaatgcccgtcttgctgctgatgactttagagtcaagtatgagacagagctggccatgcgccagtctgtggagaacgacatccatgggctccgcaaggtcattgatgacaccaatatcacacgactgcagctggagacagagatcgaggctctcaaggaggagctgctcttcatgaagaagaaccacgaagaggaagtaaaaggcctacaagcccagattgccagctctgggttgaccgtggaggtagatgcccccaaatctcaggacctcgccaagatcatggcagacatccgggcccaatatgacgagctggctcggaagaaccgagaggagctagacaagtactggtctcagcagattgaggagagcaccacagtggtcaccacacagtctgctgaggttggagctgctgagacgacgctcacagagctgagacgtacagtccagtccttggagatcgacctggactccatgagaaatctgaaggccagcttggagaacagcctgagggaggtggaggcccgctacgccctacagatggagcagctcaacgggatcctgctgcaccttgagtcagagctggcacagacccgggcagagggacagcgccaggcccaggagtatgaggccctgctgaacatcaaggtcaagctggaggctgagatcgccacctaccgccgcctgctggaagatggcgaggactttaatcttggtgatgccttggacagcagcaactccatgcaaaccatccaaaagaccaccacccgccggatagtggatggcaaagtggtgtctgagaccaatgacaccaaagttctgaggcattaagccagcagaagcagggtaccctttggggagcaggaggccaataaaaagttcagagttcaaaaaaaaaaaaaaaaaaa

SEQ ID NO: 507 - DNA, 5411 bp, Artificial Sequence
  COL1A2
gtgtcccatagtgtttccaaacttggaaagggcgggggagggcgggaggatgcggagggcggaggtatgcagacaacgagtcagagtttccccttgaaagcctcaaaagtgtccacgtcctcaaaaagaatggaaccaatttaagaagccagccccgtggccacgtcccttcccccattcgctccctcctctgcgcccccgcaggctcctcccagctgtggctgcccgggcccccagccccagccctcccattggtggaggcccttttggaggcaccctagggccagggaaacttttgccgtataaatagggcagatccgggctttattattttagcaccacggcagcaggaggtttcggctaagttggaggtactggccacgactgcatgcccgcgcccgccaggtgatacctccgccggtgacccaggggctctgcgacacaaggagtctgcatgtctaagtgctagacatgctcagctttgtggatacgcggactttgttgctgcttgcagtaaccttatgcctagcaacatgccaatctttacaagaggaaactgtaagaaagggcccagccggagatagaggaccacgtggagaaaggggtccaccaggccccccaggcagagatggtgaagatggtcccacaggccctcctggtccacctggtcctcctggcccccctggtctcggtgggaactttgctgctcagtatgatggaaaaggagttggacttggccctggaccaatgggcttaatgggacctagaggcccacctggtgcagctggagccccaggccctcaaggtttccaaggacctgctggtgagcctggtgaacctggtcaaactggtcctgcaggtgctcgtggtccagctggccctcctggcaaggctggtgaagatggtcaccctggaaaacccggacgacctggtgagagaggagttgttggaccacagggtgctcgtggtttccctggaactcctggacttcctggcttcaaaggcattaggggacacaatggtctggatggattgaagggacagcccggtgctcctggtgtgaagggtgaacctggtgcccctggtgaaaatggaactccaggtcaaacaggagcccgtgggcttcctggtgagagaggacgtgttggtgcccctggcccagctggtgcccgtggcagtgatggaagtgtgggtcccgtgggtcctgctggtcccattgggtctgctggccctccaggcttcccaggtgcccctggccccaagggtgaaattggagctgttggtaacgctggtcctgctggtcccgccggtccccgtggtgaagtgggtcttccaggcctctccggccccgttggacctcctggtaatcctggagcaaacggccttactggtgccaagggtgctgctggccttcccggcgttgctggggctcccggcctccctggaccccgcggtattcctggccctgttggtgctgccggtgctactggtgccagaggacttgttggtgagcctggtccagctggctccaaaggagagagcggtaacaagggtgagcccggctctgctgggccccaaggtcctcctggtcccagtggtgaagaaggaaagagaggccctaatggggaagctggatctgccggccctccaggacctcctgggctgagaggtagtcctggttctcgtggtcttcctggagctgatggcagagctggcgtcatgggccctcctggtagtcgtggtgcaagtggccctgctggagtccgaggacctaatggagatgctggtcgccctggggagcctggtctcatgggacccagaggtcttcctggttcccctggaaatatcggccccgctggaaaagaaggtcctgtcggcctccctggcatcgacggcaggcctggcccaattggcccagctggagcaagaggagagcctggcaacattggattccctggacccaaaggccccactggtgatcctggcaaaaacggtgataaaggtcatgctggtcttgctggtgctcggggtgctccaggtcctgatggaaacaatggtgctcagggacctcctggaccacagggtgttcaaggtggaaaaggtgaacagggtccccctggtcctccaggcttccagggtctgcctggcccctcaggtcccgctggtgaagttggcaaaccaggagaaaggggtctccatggtgagtttggtctccctggtcctgctggtccaagaggggaacgcggtcccccaggtgagagtggtgctgccggtcctactggtcctattggaagccgaggtccttctggacccccagggcctgatggaaacaagggtgaacctggtgtggttggtgctgtgggcactgctggtccatctggtcctagtggactcccaggagagaggggtgctgctggcatacctggaggcaagggagaaaagggtgaacctggtctcagaggtgaaattggtaaccctggcagagatggtgctcgtggtgctcctggtgctgtaggtgcccctggtcctgctggagccacaggtgaccggggcgaagctggggctgctggtcctgctggtcctgctggtcctcggggaagccctggtgaacgtggtgaggtcggtcctgctggccccaatggatttgctggtcctgctggtgctgctggtcaacctggtgctaaaggagaaagaggagccaaagggcctaagggtgaaaacggtgttgttggtcccacaggccccgttggagctgctggcccagctggtccaaatggtccccccggtcctgctggaagtcgtggtgatggaggcccccctggtatgactggtttccctggtgctgctggacggactggtcccccaggaccctctggtatttctggccctcctggtccccctggtcctgctgggaaagaagggcttcgtggtcctcgtggtgaccaaggtccagttggccgaactggagaagtaggtgcagttggtccccctggcttcgctggtgagaagggtccctctggagaggctggtactgctggacctcctggcactccaggtcctcagggtcttcttggtgctcctggtattctgggtctccctggctcgagaggtgaacgtggtctaccaggtgttgctggtgctgtgggtgaacctggtcctcttggcattgccggccctcctggggcccgtggtcctcctggtgctgtgggtagtcctggagtcaacggtgctcctggtgaagctggtcgtgatggcaaccctgggaacgatggtcccccaggtcgcgatggtcaacccggacacaagggagagcgcggttaccctggcaatattggtcccgttggtgctgcaggtgcacctggtcctcatggccccgtgggtcctgctggcaaacatggaaaccgtggtgaaactggtccttctggtcctgttggtcctgctggtgctgttggcccaagaggtcctagtggcccacaaggcattcgtggcgataagggagagcccggtgaaaaggggcccagaggtcttcctggcttaaagggacacaatggattgcaaggtctgcctggtatcgctggtcaccatggtgatcaaggtgctcctggctccgtgggtcctgctggtcctaggggccctgctggtccttctggccctgctggaaaagatggtcgcactggacatcctggtacagttggacctgctggcattcgaggccctcagggtcaccaaggccctgctggcccccctggtccccctggccctcctggacctccaggtgtaagcggtggtggttatgactttggttacgatggagacttctacagggctgaccagcctcgctcagcaccttctctcagacccaaggactatgaagttgatgctactctgaagtctctcaacaaccagattgagacccttcttactcctgaaggctctagaaagaacccagctcgcacatgccgtgacttgagactcagccacccagagtggagcagtggttactactggattgaccctaaccaaggatgcactatggatgctatcaaagtatactgtgatttctctactggcgaaacctgtatccgggcccaacctgaaaacatcccagccaagaactggtataggagctccaaggacaagaaacacgtctggctaggagaaactatcaatgctggcagccagtttgaatataatgtagaaggagtgacttccaaggaaatggctacccaacttgccttcatgcgcctgctggccaactatgcctctcagaacatcacctaccactgcaagaacagcattgcatacatggatgaggagactggcaacctgaaaaaggctgtcattctacagggctctaatgatgttgaacttgttgctgagggcaacagcaggttcacttacactgttcttgtagatggctgctctaaaaagacaaatgaatggggaaagacaatcattgaatacaaaacaaataagccatcacgcctgcccttccttgatattgcacctttggacatcggtggtgctgaccaggaattctttgtggacattggcccagtctgtttcaaataaatgaactcaatctaaattaaaaaagaaagaaatttgaaaaaactttctctttgccatttcttcttcttcttttttaactgaaagctgaatccttccatttcttctgcacatctacttgcttaaattgtgggcaaaagagaaaaagaaggattgatcagagcattgtgcaatacagtttcattaactccttcccccgctcccccaaaaatttgaatttttttttcaacactcttacacctgttatggaaaatgtcaacctttgtaagaaaaccaaaataaaaattgaaaaataaaaaccataaacatttgcaccacttgtggcttttgaatatcttccacagagggaagtttaaaacccaaacttccaaaggtttaaactacctcaaaacactttcccatgagtgtgatccacattgttaggtgctgacctagacagagatgaactgaggtccttgttttgttttgttcataatacaaaggtgctaattaatagtatttcagatacttgaagaatgttgatggtgctagaagaatttgagaagaaatactcctgtattgagttgtatcgtgtggtgtattttttaaaaaatttgatttagcattcatattttccatcttattcccaattaaaagtatgcagattatttgcccaaatcttcttcagattcagcatttgttctttgccagtctcattttcatcttcttccatggttccacagaagctttgtttcttgggcaagcagaaaaattaaattgtacctattttgtatatgtgagatgtttaaataaattgtgaaaaaaatgaaataaagcatgtttggttttccaaaagaacatat

SEQ ID NO: 508 - DNA, 3070 bp, Artificial Sequence
  GATA3
ggcgccgtcttgatactttcagaaagaatgcattccctgtaaaaaaaaaaaaaaaatactgagagagggagagagagagagaagaagagagagagacggagggagagcgagacagagcgagcaacgcaatctgaccgagcaggtcgtacgccgccgcctcctcctcctctctgctcttcgctacccaggtgacccgaggagggactccgcctccgagcggctgaggaccccggtgcagaggagcctggctcgcagaattgcagagtcgtcgcccctttttacaacctggtcccgttttattctgccgtacccagtttttggatttttgtcttccccttcttctctttgctaaacgacccctccaagataatttttaaaaaaccttctcctttgctcacctttgcttcccagccttcccatccccccaccgaaagcaaatcattcaacgacccccgaccctccgacggcaggagccccccgacctcccaggcggaccgccctccctccccgcgcgcgggttccgggcccggcgagagggcgcgagcacagccgaggccatggaggtgacggcggaccagccgcgctgggtgagccaccaccaccccgccgtgctcaacgggcagcacccggacacgcaccacccgggcctcagccactcctacatggacgcggcgcagtacccgctgccggaggaggtggatgtgctttttaacatcgacggtcaaggcaaccacgtcccgccctactacggaaactcggtcagggccacggtgcagaggtaccctccgacccaccacgggagccaggtgtgccgcccgcctctgcttcatggatccctaccctggctggacggcggcaaagccctgggcagccaccacaccgcctccccctggaatctcagccccttctccaagacgtccatccaccacggctccccggggcccctctccgtctaccccccggcctcgtcctcctccttgtcggggggccacgccagcccgcacctcttcaccttcccgcccaccccgccgaaggacgtctccccggacccatcgctgtccaccccaggctcggccggctcggcccggcaggacgagaaagagtgcctcaagtaccaggtgcccctgcccgacagcatgaagctggagtcgtcccactcccgtggcagcatgaccgccctgggtggagcctcctcgtcgacccaccaccccatcaccacctacccgccctacgtgcccgagtacagctccggactcttcccccccagcagcctgctgggcggctcccccaccggcttcggatgcaagtccaggcccaaggcccggtccagcacagaaggcagggagtgtgtgaactgtggggcaacctcgaccccactgtggcggcgagatggcacgggacactacctgtgcaacgcctgcgggctctatcacaaaatgaacggacagaaccggcccctcattaagcccaagcgaaggctgtctgcagccaggagagcagggacgtcctgtgcgaactgtcagaccaccacaaccacactctggaggaggaatgccaatggggaccctgtctgcaatgcctgtgggctctactacaagcttcacaatattaacagacccctgactatgaagaaggaaggcatccagaccagaaaccgaaaaatgtctagcaaatccaaaaagtgcaaaaaagtgcatgactcactggaggacttccccaagaacagctcgtttaacccggccgccctctccagacacatgtcctccctgagccacatctcgcccttcagccactccagccacatgctgaccacgcccacgccgatgcacccgccatccagcctgtcctttggaccacaccacccctccagcatggtcaccgccatgggttagagccctgctcgatgctcacagggcccccagcgagagtccctgcagtccctttcgacttgcatttttgcaggagcagtatcatgaagcctaaacgcgatggatatatgtttttgaaggcagaaagcaaaattatgtttgccactttgcaaaggagctcactgtggtgtctgtgttccaaccactgaatctggaccccatctgtgaataagccattctgactcatatcccctatttaacagggtctctagtgctgtgaaaaaaaaaatgctgaacattgcatataacttatattgtaagaaatactgtacaatgactttattgcatctgggtagctgtaaggcatgaaggatgccaagaagtttaaggaatatgggagaaatagtgtggaaattaagaagaaactaggtctgatattcaaatggacaaactgccagttttgtttcctttcactggccacagttgtttgatgcattaaaagaaaataaaaaaaagaaaaaagagaaaagaaaaaaaaagaaaaaagttgtaggcgaatcatttgttcaaagctgttggcctctgcaaaggaaataccagttctgggcaatcagtgttaccgttcaccagttgccgttgagggtttcagagagcctttttctaggcctacatgctttgtgaacaagtccctgtaattgttgtttgtatgtataattcaaagcaccaaaataagaaaagatgtagatttatttcatcatattatacagaccgaactgttgtataaatttatttactgctagtcttaagaactgctttctttcgtttgtttgtttcaatattttccttctctctcaatttttggttgaataaactagattacattcagttggcctaaggtggttgtgctcggagggtttcttgtttcttttccattttgtttttggatgatatttattaaatagcttctaagagtccggcggcatctgtcttgtccctattcctgcagcctgtgctgagggtagcagtgtatgagctaccagcgtgcatgtcagcgaccctggcccgacaggccacgtcctgcaatcggcccggctgcctcttcgccctgtcgtgttctgtgttagtgatcactgcctttaatacagtctgttggaataatattataagcataataataaagtgaaaatattttaaaactacaa

SEQ ID NO: 509 - DNA, 1895 bp, Artificial Sequence
  HNRNPL
ctcttttcgatccgggacggccggtcaggctcgccgccgagctggagaactacgatgacccgcacaaaacccctgcctccccagttgtccacatcaggggcctgattgacggtgtggtggaagcagaccttgtggaggccttgcaggagtttggacccatcagctatgtggtggtaatgcctaaaaagagacaagcactggtggagtttgaagatgtgttgggggcttgcaacgcagtgaactacgcagccgacaaccaaatatacattgctggtcacccagcttttgtcaactactctaccagccagaagatctcccgccctggggactcggatgactcccggagcgtgaacagtgtgcttctctttaccatcctgaaccccatttattcgatcaccacggatgttctttacactatctgtaatccttgtggccctgtccagagaattgtcattttcaggaagaatggagttcaggcgatggtggaatttgactcagttcaaagtgcccagcgggccaaggcctctctcaatggggctgatatctattctggctgttgcactctgaagatcgaatacgcaaagcctacacgcttgaatgtgttcaagaatgatcaggatacttgggactacacaaaccccaatctcagtggacaaggtgaccctggcagcaaccccaacaaacgccagaggcagccccctctcctgggagatcaccccgcagaatatggagggccccacggtgggtaccacagccattaccatgatgagggctacgggccccccccacctcactacgaagggagaaggatgggtccaccagtggggggtcaccgtcggggcccaagtcgctacggcccccagtatgggcaccccccaccccctcccccaccacccgagtatggccctcacgccgacagccctgtgctcatggtctatggcttggatcaatctaagatgaactgtgaccgagtcttcaatgtcttctgcttatatggcaatgtggagaaggtgaaattcatgaaaagcaagccgggggccgccatggtggagatggctgatggctacgctgtagaccgggccattacccacctcaacaacaacttcatgtttgggcagaagctgaatgtctgtgtctccaagcagccagccatcatgcctggtcagtcatacgggttggaagacgggtcttgcagttacaaagacttcagtgaatcccggaacaatcggttctccaccccagagcaggcagccaagaaccgcatccagcaccccagcaacgtgctgcacttcttcaacgccccgctggaggtgaccgaggagaacttctttgagatctgcgatgagctgggagtgaagcggccatcttctgtgaaagtattctcaggcaaaagtgagcgcagctcctctggactgctggagtgggaatccaagagcgatgccctggagactctgggcttcctgaaccattaccagatgaaaaacccaaatggtccatacccttacactctgaagttgtgtttctccactgctcagcacgcctcctaattaggtgcctaggaagagtcccatctgagcaggaagacatttctctttcctttatgccattttttgtttttgttatttgcaaaagatcttgtattccttttttttttttttttttttttttttaaatgctaggtttgtagaggcttacttaaccttaatggaaacgctggaaatctgcagggggagggagaggggaactgttatctcccaagattaaccttcacttttaaaaaattattgtacatgtgatttttttttttcctgttcatacatttgtgctgcccatgtactcttggcacatttcaataaaattgtttggaaaataaacacagcaaaaaaaaaaaaaaa

SEQ ID NO: 510 - DNA, 2705 bp, Artificial Sequence
  METTL2A
ggccggctcctaccctgaaggtgcacctgcagtcctcgccgataagaggcagcagttcggaagccggttcctgagagatccggcgcgcgtcttccaccacaatgcctggtaatcactctgccccttcgcccggcctgtcgctgaccctctgtcccgccgcctcggagcactccgaaaagcccctgaccgccggccacgagtcaagctgccctacccgaggcactctccaaggggagagaaactcctaggccagcgactcaccctgcccgcagccaggacgtgaggcccctaagctgcccgtttgattttctcagggacaatgtggagtggtcggaagagcaagccgcggcggcggagagaaaagtccaggagaacagtatccagcgggtgtgccaggagaaacaagttgattatgagatcaatgcccacaaatactggaatgacttctacaaaatccacgaaaatgggtttttcaaggatagacattggctttttaccgaattccctgagctggcacctagccaaaatcaaaatcatttgaaggactggttcttggagaacaagagtgaagtacctgaatgtagaaacaatgaggatggacctggtttaataatggaagaacagcacaagtgttcttcaaagagccttgaacataaaacacagacacttcctgtggaggagaatgtaactcagaaaattagtgacctggaaatttgtgctgatgagtttcctggatcctcagccacctaccgaatactggaggttggctgtggtgtgggaaacacagtctttccaattttacaaacgaacaatgacccaggactctttgtttattgctgtgatttttcttccacagctatagaactggtccagacaaattcagaatatgatccttctcggtgttttgcctttgttcacgacctgtgtgatgaagagaagagttacccagtgcccaagggcagtcttgatattatcattctcatatttgttctttcagcaattgttccagacaagatgcagaaggctatcaacaggctgagcaggcttctgaaacctggcgggatgatgcttctgcgagattacggccgctatgacatggctcagcttcggtttaaaaaaggtcagtgtctatctggaaatttctacgtgagaggtgatggaaccagagtttacttcttcacacaagaggaactggacacgcttttcaccactgctggactggaaaaagttcagaacctggtggatcgccgactgcaggtgaaccgaggaaagcaactgacaatgtaccgggtttggattcagtgcaaatactgcaagccccttctgtccagcaccagctgagaggcacctgctgccaacacgatgcaagcccattgtgtttccgggcttttttaaaaaaaaaattgtagcactgggcgtggtgcatgcctgtaatcccagccactcaggaggctgaggcggggaggatccattgagcccagcagtccaacctgggcaaaatagtgagagaccctgtatctgaaagtaataataaaaataaaaaatataaatgaggtctcgttgatgttggacaattcaagaattcagacttgaaccttaaacctaggaaaagttactttgtatcaggattctaacaattatgcttcatatttgtgaagtcctttaaaacataattttctcaagttctttctttgagatctcaatctgtcttagcattttgtaactaataactgaaattttattcaaaggaattgtaaaccttaaaccaccaatttatttccatgtgaaaaagtgttacatatgacaagtgttttttgactgtaattgcgttaaatcttttgagaatgtaaatgccgggctaggcaattgcagttaatacatacagaggttagtgaagggcttattaagttgtaggggaagcaagctgggaagaatcagatcagatattttcctgacaaaaaaaaatgaccctacagagagcatcaaaatgtggtgttcttgttaagtaattgatcgtggtcttcgctttaatcttagttccgccaggcacggtggctcacacctgtaatcccagcactttgggaggccaaggcgggcggatcagctgaggtcaggagttggagaccagcgtggccaacatggtgaaaccccgtctctactaaagataaaaaaattagctgagtgtgttggtgggtgcctgtaatccagctacttgggagactgaggcaggagaattgcttgaacccaggaggcagaggttgcagtgagctgagattgtgccactgcactccagcctgggcaacaaagcaagactctgtctcaaaaaaataaaaataaaaaaaaaatcttagttccatggaattttaagcattgttccccctctaacctgtgtctaaagaattaaaagaatttggccgggtgcggcagctcatgcctgtaatcccaacactttgggaggctgaggcaggcggatcacgaggtcaggagatcgagaccatcctggccaacacggtgaaacctcgtctccactaaaaataccaaaaaaattagctgggcatggtggcacacacctgtagtcccctgtagtcccagctactcgggaggctgaggcaggagaatcgtttgaacctgggaggtggaggttgcagtgagccaagatcatgtcactgcattccagcctgggcaacagaggaagactccgtctc

SEQ ID NO: 511 - DNA, 2695 bp, Artificial Sequence
  STAR
gcagtgtgaggcaatcgctctatccttgaccccttcctttgcacagtgagtgatggcgtttttatctcctgatgatgatgcacagccttcagcgggggacatttaagacgcagaacaccaggtccaggctgcagctgcgggactcagaggcgaagcttgaggggctcaggaaggacgaagaaccacccttgagagaagaggcagcagcagcggcggcagcagcagcggcagcgaccccaccactgccacatttgccaggaaacaatgctgctagcgacattcaagctgtgcgctgggagctcctacagacacatgcgcaacatgaaggggctgaggcaacaggctgtgatggccatcagccaggagctgaaccggagggccctggggggccccacccctagcacgtggattaaccaggttcggcggcggagctctctactcggttctcggctggaagagactctctacagtgaccaggagctggcctatctccagcagggggaggaggccatgcagaaggccttgggcatccttagcaaccaagagggctggaagaaggagagtcagcaggacaatggggacaaagtgatgagtaaagtggtcccagatgtgggcaaggtgttccggctggaggtcgtggtggaccagcccatggagaggctctatgaagagctcgtggagcgcatggaagcaatgggggagtggaaccccaatgtcaaggagatcaaggtcctgcagaagatcggaaaagatacattcattactcacgagctggctgccgaggcagcaggaaacctggtggggccccgtgactttgtgagcgtgcgctgtgccaagcgccgaggctccacctgtgtgctggctggcatggccacagacttcgggaacatgcctgagcagaagggtgtcatcagggcggagcacggtcccacttgcatggtgcttcacccgttggctggaagtccctctaagaccaaacttacgtggctactcagcatcgacctcaaggggtggctgcccaagagcatcatcaaccaggtcctgtcccagacccaggtggattttgccaaccacctgcgcaagcgcctggagtcccaccctgcctctgaagccaggtgttgaagaccagcctgctgttcccaactgtgcccagctgcactggtacacacgctcatcaggagaatccctactggaagcctgcaagtctaagatctccatctggtgacagtgggatgggtggggttcgtgtttagagtatgacactaggattcagattggtgaaagtttttagtaccaagaaaacagggatgaggctcttggattaaaaggtaacttcattcactgattagctatgacatgagggttcaggcccctaaaataattgtaaaactttttttctgggcccttatgtacccacctaaaaccatctttaaaatgctagtggctgatatgggtgtgggggatgctaaccacagggcctgagaagtcttgctttatgggctcaagaatgccatgcgctggcagtacatgtgcacaaagcagaatctcagagggtctcctgcagccctctgctcctcccggccgctgcacagcaacaccacagaacaagcagcaccccacagtgggtgccttccagaaatatagtccaagctttctctgtggaaaaagacaaaactcattagtagacatgtttccctattgctttcataggcaccagtcagaataaagaatcataattcacacaaacatcagtctttgttttaatattgtactgttaaaaaaatctatgcagctgggtgcagtggctcacgcctgtaatcccagcattttgggaggctgaggtaggcggatcacaaggtcaggagatcgagaccatcctggccaacatggtgaaaccccgtctctactaaaatacaaaaaattagctgggtgtggtggcgcaaacctgtagtcgtagctacttgggaggctgaggcaggggaatcacttgaaccccggaggcggaggttgtagtgggccgagattgtgccactgcgctccagcgtgggcgacagagtgagactccatctcaaaaaaaaaaaaaaaaaaatctatgctagtagattacaacttcacactagaggagttctggacaaagcttttaattagtcaaactaaattaaggctcattaaaaggaaaggaactactgggaaattatgcaattcaataatttagactctgttaccaggatctttcataaaaatttaatttccataatcataacctaaatgagttcttaaagaattctataagcaatagctgattaatgggccctggaagatgaagattataactgtttatttacctaattaaaaggaaaggcagtgccaaatatgagaggataaacaatattagttaacatttctgttatttatgatgccaattagtagtaagataattccacagctgtcaactttgtttggggctggcaacttctctgcttaaacaggctaaaagtttagtattctgggagaagtggctggaagaaggggtaatatggtgaaagcaaattccctttcccaggagtcaagagaatttatgtgaggtggctcccgcctgtaatctcagcactttgggaggccaaggcaggcaatcacctgagggcaggagaccagcctgactaacatggagaaaccccatctctactaaaaatac

SEQ ID NO: 512 - DNA, 578 bp, Artificial Sequence
  STATH
gagtgtttaaatacattggccctctagggtagcacatcatctcttgaagcttcacttcaacttcactacttctgtagtctcatcttgagtaaaagagaacccagccaactatgaagttccttgtctttgccttcatcttggctctcatggtttccatgattggagctgattcatctgaagagtatgggtatggcccttatcagccagttccagaacaaccactatacccacaaccataccaaccacaataccaacaatataccttttaatatcatcagtaactgcaggacatgattattgaggcttgattggcaaatacgacttctacatccatattctcatctttcataccatatcacactactaccactttttgaagaatcatcaaagagcaatgcaaatgaaaaacactataatttactgtatactctttgtttcaggatacttgccttttcaattgtcacttgatgatataattgcaatttaaactgttaagctgtgttcagtactgtttctgaataatagaaatcacttctctaaaagcaataaatttcaagcacatttttacataaaaaaaa

SEQ ID NO: 513 - DNA, 3453 bp, Artificial Sequence
  VWA8
cacggtgcctgcacgggacgccgctcgatccccgagccccctcgccgtccccgacagcccccccggcgccatgcaatcccggcttctactcctcggggcacccggaggccacggcggcccggcctcgcggcgcatgcggctgctcctgcggcaggtggtgcagcgcaggccgggtggcgacaggcagcggccggaggtcagactgttgcacgccggctcgggggccgacacaggtgatacagttaatattggagatgtatcctacaagttgaaaattcctaagaatccagaacttgtgccacagaactacatttcagactctctggctcaatctgtagttcagcatctaagatggataatgcagaaggatcttttggggcaagatgtttttctaataggacctcctgggcctcttcgacgctctattgctatgcagtacttggagctgaccaaacgggaggtcgaatacattgccctgtcaagggacaccactgaaactgatctcaaacagcgacgagagatccgtgcaggcacagccttttacattgatcagtgtgcagttcgtgcagccacagaaggcagaactctcattttggaaggtttggaaaaggcagagaggaatgttttgcctgttttgaacaacttgctggaaaacagagagatgcagcttgaagatggacgcttcctgatgtctgctgagcgttacgacaaacttctccgagatcataccaaaaaagagttggattcttggaaaattgtccgagttagtgaaaatttccgagtgattgccttgggcttgccagtgccaaggtattctgggaatccattagacccccctcttcgttctcgatttcaagccagggatatttattatttacccttcaaggaccaacttaagttgttatattcaattggagccaatgtttctgctgagaaagtttctcagctcttgtcctttgccacaactctgtgttcccaagaatcttctactcttggacttccagactttcctttagatagtttagcagctgcggttcaaatcttggattcctttcctatgatgccaatcaaacatgcaatccagtggctttatccatatagtattttactaggtcatgaagggaagatggctgtggaaggtgttttaaagcgctttgaacttcaagattcaggaagctctctacttcctaaagagattgtaaaagtagagaagatgatggaaaaccatgtgtcccaagcttctgtgaccatccggattgcagataaagaggtgaccattaaggtgccagccgggaccaggctattaagtcaaccttgtgcgtcagaccgtttcatacagactttgagccataagcagctacaggctgaaatgatgcagtctcacatggttaaagatatatgtttaattggaggaaagggttgtggaaaaacagtgatcgctaagaactttgccgataccttaggatacaacatagaacctattatgctctatcaggatatgacagcgcgtgatctgctacagcagagatacacccttccaaatggagacactgcctggcggtcctcaccccttgtgaatgctgctctggaaggcaagctggtcctgctggatggcattcaccgggtgaatgcgggcacgcttgctgtattgcaaaggttaatccatgatcgagagctaagcctctatgatggttctaggctgctgagagaagacaggtatatgcgtttaaaggaggagctgcaactgtctgatgaacagctacagaagagatccatttttcctatccatccctccttcagaatcattgccttggcagaaccccctgttattggaagcacagcacaccagtggctgggaccagaattcttaaccatgttctttttccattacatgaaaccacttgtgaaaagtgaagaaatccaagtgattaaggaaaaggtcccaaatgtacctcaggaagctctggataagttattatcatttacacacaaactcagagaaacacaggatccaacggcacaatcattagcggcatcactttctaccagacaactgttgcgaatttctcgtcggctgtcacagtatcctaatgaaaatcttcacagtgctgttactaaagcctgcctttccaggtttttacccagtcttgctaggtcagcattagaaaaaaatctggcagatgctacaatagaaataaatactgatgacaatttggagccagaactgaaggattacaaatgtgaagtaacatctggaactctgaggattggtgctgttagtgcaccgatctataatgcacatgagaaaatgaaagtgcctgatgttcttttctatgacaacattcagcatgtgatagtgatggaagatatgctgaaagactttctccttggagaacacttattattggttggcaaccagggtgtaggaaaaaacaagattgttgacagattccttcacctgctcaacagaccccgagaatatattcagctacacagggataccacagtacaaactcttacgcttcagccttcggttaaagacggacttattgtatatgaagactcacctttggttaaagcagtaaagttgggtcatattctggtagtagatgaggctgacaaagctccaacaaatgtcacgtgtattttaaaaactctagtagaaaatggagaaatgattctagcagatggaagacgcattgttgcaaattctgctaatgtgaatggaagagaaaatgttgtagtgattcatcctgattttaggatgattgttctggcaaatagacctggatttcctttcctaggcaatgatttcttcggtaccttaggtgatatttttagctgccatgcagttgataaccccaaaccccactcggagctcgagatgctcagacagtatggaccaaatgtgcctgagcccatccttcagaagcttgtggctgcctttggagagctgaggagtttggctgaccaagggattattaactatccttattctaccagagaagttgtcaacatagtcaaacatttacagaaatttccgactgaaggtctctccagtgtagttcgaaatgtgtttgactttgattcctacaacaatgacatgagggagatattgattaacactttacacaaatacgggatacctatcggagcaaagcctaccagtgtgcagctggcaaaggagtaaggcaaattcagtactcttctgattcttaaatgctgatagttcttgatttatcattccattctacaaaactgagttgctatggaaattactttccatgagtaagcttttcaaatacatgtatatgttgctgtttgctggctgcttttcagttaaatagcattatttataggcctgtaaattgaaaattttgattattatgtatgtcccatgagtagatgtaataaataaagggaaatatttgtttctttaaaaaaaaaaaaaaa

SEQ ID NO: 514 - DNA, 3488 bp, Artificial Sequence
  GAD1
gcaaaaccgtgagctggatttataatcgccctataaagctccagaggcggtcaggcacctgcagaggagccccgccgctccgccgactagctgcccccgcgagcaacggcctcgtgatttccccgccgatccggtccccgcctccccactctgcccccgcctaccccggagccgtgcagccgcctctccgaatctctctcttctcctggcgctcgcgtgcgagagggaactagcgagaacgaggaagcagctggaggtgacgccgggcagattacgcctgtcagggccgagccgagcggatcgctgggcgctgtgcagaggaaaggcgggagtgcccggctcgctgtcgcagagccgagcctgtttctgcgccggaccagtcgaggactctggacagtagaggccccgggacgaccgagctgatggcgtcttcgaccccatcttcgtccgcaacctcctcgaacgcgggagcggaccccaataccactaacctgcgccccacaacgtacgatacctggtgcggcgtggcccatggatgcaccagaaaactggggctcaagatctgcggcttcttgcaaaggaccaacagcctggaagagaagagtcgccttgtgagtgccttcaaggagaggcaatcctccaagaacctgctttcctgtgaaaacagcgaccgggatgcccgcttccggcgcacagagactgacttctctaatctgtttgctagagatctgcttccggctaagaacggtgaggagcaaaccgtgcaattcctcctggaagtggtggacatactcctcaactatgtccgcaagacatttgatcgctccaccaaggtgctggactttcatcacccacaccagttgctggaaggcatggagggcttcaacttggagctctctgaccaccccgagtccctggagcagatcctggttgactgcagagacaccttgaagtatggggttcgcacaggtcatcctcgatttttcaaccagctctccactggattggatattattggcctagctggagaatggctgacatcaacggccaataccaacatgtttacatatgaaattgcaccagtgtttgtcctcatggaacaaataacacttaagaagatgagagagatagttggatggtcaagtaaagatggtgatgggatattttctcctgggggcgccatatccaacatgtacagcatcatggctgctcgctacaagtacttcccggaagttaagacaaagggcatggcggctgtgcctaaactggtcctcttcacctcagaacagagtcactattccataaagaaagctggggctgcacttggctttggaactgacaatgtgattttgataaagtgcaatgaaagggggaaaataattccagctgattttgaggcaaaaattcttgaagccaaacagaagggatatgttcccttttatgtcaatgcaactgctggcacgactgtttatggagcttttgatccgatacaagagattgcagatatatgtgagaaatataacctttggttgcatgtcgatgctgcctggggaggtgggctgctcatgtccaggaagcaccgccataaactcaacggcatagaaagggccaactcagtcacctggaaccctcacaagatgatgggcgtgctgttgcagtgctctgccattctcgtcaaggaaaagggtatactccaaggatgcaaccagatgtgtgcaggatacctcttccagccagacaagcagtatgatgtctcctacgacaccggggacaaggcaattcagtgtggccgccacgtggatatcttcaagttctggctgatgtggaaagcaaagggcacagtgggatttgaaaaccagatcaacaaatgcctggaactggctgaatacctctatgccaagattaaaaacagagaagaatttgagatggttttcaatggcgagcctgagcacacaaacgtctgtttttggtatattccacaaagcctcaggggtgtgccagacagccctcaacgacgggaaaagctacacaaggtggctccaaaaatcaaagccctgatgatggagtcaggtacgaccatggttggctaccagccccaaggggacaaggccaacttcttccggatggtcatctccaacccagccgctacccagtctgacattgacttcctcattgaggagatagaaagactgggccaggatctgtaatcatccttcgcagaacatgagtttatgggaatgccttttccctctggcactccagaacaaacctctatatgttgctgaaacacacaggccatttcattgagggaaaacataatatcttgaagaatattgttaaaaccttacttaaagcttgtttgttctagttagcaggaaatagtgttctttttaaaaagttgcacattaggaacagagtatatatgtacagttatacatacctctctctatatatacatgtatagtgagtgtggcttagtaatagatcacggcatgtttcccgctccaagagaattcactttaccttcagcagttaccgaggagctaaacatgctgccaaccagcttgtccaacaactccaggaaaactgtttttcaaaacgccatgtcctaggggccaagggaaatgctgttggtgagaatcgacctcactgtcagcgtttctccacctgaagtgatgatggatgagaaaaaacaccaccaaatgacaagtcacaccctccccattagtatcctgttaggggaaaatagtagcagagtcattgttacaggtgtactatggctgtatttttagagattaatttgtgtagattgtgtaaattcctgttgtctgaccttggtggtgggagggggagactatgtgtcatgatttcaatgattgtttaattgtaggtcaatgaaatatttgcttatttatattcagagatgtaccatgttaaagaggcgtcttgtattttcttcccatttgtaatgtatcttatttatatatgaagtaagttctgaaaactgtttatggtattttcgtgcatttgtgagccaaagagaaaagattaaaattagtgagatttgtatttatattagagtgcccttaaaataatgatttaagcattttactgtctgtaagagaattctaagattgtacataaagtcatatatatggaaatcctgttacttaaatagcatctgctcttctcttacgctctctgtctggctgtacgtctggtgttctcaatgcttttctagcaactgttggataataactagatctcctgtaattttgtagtagttgatgaccaatctctgtgactcgcttagctgaaacctaaggcaacatttccgaagaccttctgaagatctcagataaagtgaccaggctcacaactgtttttgaagaagggaaattcacactgtgcgttttagagtatgcaagaagaatataaataaataaaaatattctccatggagaatttgaacaaaaaaaaaaaaaaaa

SEQ ID NO: 515 - DNA, 3350 bp, Artificial Sequence
  CLDN18
agaattgcgctgtccacttgtcgtgtggctctgtgtcgacactgtgcgccaccatggccgtgactgcctgtcagggcttggggttcgtggtttcactgattgggattgcgggcatcattgctgccacctgcatggaccagtggagcacccaagacttgtacaacaaccccgtaacagctgttttcaactaccaggggctgtggcgctcctgtgtccgagagagctctggcttcaccgagtgccggggctacttcaccctgctggggctgccagccatgctgcaggcagtgcgagccctgatgatcgtaggcatcgtcctgggtgccattggcctcctggtatccatctttgccctgaaatgcatccgcattggcagcatggaggactctgccaaagccaacatgacactgacctccgggatcatgttcattgtctcaggtctttgtgcaattgctggagtgtctgtgtttgccaacatgctggtgactaacttctggatgtccacagctaacatgtacaccggcatgggtgggatggtgcagactgttcagaccaggtacacatttggtgcggctctgttcgtgggctgggtcgctggaggcctcacactaattgggggtgtgatgatgtgcatcgcctgccggggcctggcaccagaagaaaccaactacaaagccgtttcttatcatgcctcaggccacagtgttgcctacaagcctggaggcttcaaggccagcactggctttgggtccaacaccaaaaacaagaagatatacgatggaggtgcccgcacagaggacgaggtacaatcttatccttccaagcacgactatgtgtaatgctctaagacctctcagcacgggcggaagaaactcccggagagctcacccaaaaaacaaggagatcccatctagatttcttcttgcttttgactcacagctggaagttagaaaagcctcgatttcatctttggagaggccaaatggtcttagcctcagtctctgtctctaaatattccaccataaaacagctgagttatttatgaattagaggctatagctcacattttcaatcctctatttctttttttaaatataactttctactctgatgagagaatgtggttttaatctctctctcacattttgatgatttagacagactccccctcttcctcctagtcaataaacccattgatgatctatttcccagcttatccccaagaaaacttttgaaaggaaagagtagacccaaagatgttattttctgctgtttgaattttgtctccccacccccaacttggctagtaataaacacttactgaagaagaagcaataagagaaagatatttgtaatctctccagcccatgatctcggttttcttacactgtgatcttaaaagttaccaaaccaaagtcattttcagtttgaggcaaccaaacctttctactgctgttgacatcttcttattacagcaacaccattctaggagtttcctgagctctccactggagtcctctttctgtcgcgggtcagaaattgtccctagatgaatgagaaaattattttttttaatttaagtcctaaatatagttaaaataaataatgttttagtaaaatgatacactatctctgtgaaatagcctcacccctacatgtggatagaaggaaatgaaaaaataattgctttgacattgtctatatggtactttgtaaagtcatgcttaagtacaaattccatgaaaagctcactgatcctaattctttccctttgaggtctctatggctctgattgtacatgatagtaagtgtaagccatgtaaaaagtaaataatgtctgggcacagtggctcacgcctgtaatcctagcactttgggaggctgaggaggaaggatcacttgagcccagaagttcgagactagcctgggcaacatggagaagccctgtctctacaaaatacagagagaaaaaatcagccagtcatggtggcctacacctgtagtcccagcattccgggaggctgaggtgggaggatcacttgagcccagggaggttggggctgcagtgagccatgatcacaccactgcactccagccaggtgacatagcgagatcctgtctaaaaaaataaaaaataaataatggaacacagcaagtcctaggaagtaggttaaaactaattctttaaaaaaaaaaaaaagttgagcctgaattaaatgtaatgtttccaagtgacaggtatccacatttgcatggttacaagccactgccagttagcagtagcactttcctggcactgtggtcggttttgttttgttttgctttgtttagagacggggtctcactttccaggctggcctcaaactcctgcactcaagcaattcttctaccctggcctcccaagtagctggaattacaggtgtgcgccatcacaactagctggtggtcagttttgttactctgagagctgttcacttctctgaattcacctagagtggttggaccatcagatgtttgggcaaaactgaaagctctttgcaaccacacaccttccctgagcttacatcactgcccttttgagcagaaagtctaaattccttccaagacagtagaattccatcccagtaccaaagccagataggccccctaggaaactgaggtaagagcagtctctaaaaactacccacagcagcattggtgcaggggaacttggccattaggttattatttgagaggaaagtcctcacatcaatagtacatatgaaagtgacctccaaggggattggtgaatactcataaggatcttcaggctgaacagactatgtctggggaaagaacggattatgccccattaaataacaagttgtgttcaagagtcagagcagtgagctcagaggcccttctcactgagacagcaacatttaaaccaaaccagaggaagtatttgtggaactcactgcctcagtttgggtaaaggatgagcagacaagtcaactaaagaaaaaagaaaagcaaggaggagggttgagcaatctagagcatggagtttgttaagtgctctctggatttgagttgaagagcatccatttgagttgaaggccacagggcacaatgagctctcccttctaccaccagaaagtccctggtcaggtctcaggtagtgcggtgtggctcagctgggtttttaattagcgcattctctatccaacatttaattgtttgaaagcctccatatagttagattgtgctttgtaattttgttgttgttgctctatcttattgtatatgcattgagtattaacctgaatgttttgttacttaaatattaaaaacactgttatcctacagtt

SEQ ID NO: 516 - DNA, 2794 bp, Artificial Sequence
  AKT1
cggcaggaccgagcgcggcaggcggctggcccagcgcagccagcgcggcccgaaggacgggagcaggcggccgagcaccgagcgctgggcaccgggcaccgagcggcggcggcacgcgaggcccggccccgagcagcgcccccgcccgccgcggcctccagcccggccccgcccagcgccggcccgcggggatgcggagcggcgggcgccggaggccgcggcccggctaggcccgcgctcgcgcccggacgcggcggcccgaggctgtggccaggccagctgggctcggggagcgccagcctgagaggagcgcgtgagcgtcgcgggagcctcgggcaccatgagcgacgtggctattgtgaaggagggttggctgcacaaacgaggggagtacatcaagacctggcggccacgctacttcctcctcaagaatgatggcaccttcattggctacaaggagcggccgcaggatgtggaccaacgtgaggctcccctcaacaacttctctgtggcgcagtgccagctgatgaagacggagcggccccggcccaacaccttcatcatccgctgcctgcagtggaccactgtcatcgaacgcaccttccatgtggagactcctgaggagcgggaggagtggacaaccgccatccagactgtggctgacggcctcaagaagcaggaggaggaggagatggacttccggtcgggctcacccagtgacaactcaggggctgaagagatggaggtgtccctggccaagcccaagcaccgcgtgaccatgaacgagtttgagtacctgaagctgctgggcaagggcactttcggcaaggtgatcctggtgaaggagaaggccacaggccgctactacgccatgaagatcctcaagaaggaagtcatcgtggccaaggacgaggtggcccacacactcaccgagaaccgcgtcctgcagaactccaggcaccccttcctcacagccctgaagtactctttccagacccacgaccgcctctgctttgtcatggagtacgccaacgggggcgagctgttcttccacctgtcccgggagcgtgtgttctccgaggaccgggcccgcttctatggcgctgagattgtgtcagccctggactacctgcactcggagaagaacgtggtgtaccgggacctcaagctggagaacctcatgctggacaaggacgggcacattaagatcacagacttcgggctgtgcaaggaggggatcaaggacggtgccaccatgaagaccttttgcggcacacctgagtacctggcccccgaggtgctggaggacaatgactacggccgtgcagtggactggtgggggctgggcgtggtcatgtacgagatgatgtgcggtcgcctgcccttctacaaccaggaccatgagaagctttttgagctcatcctcatggaggagatccgcttcccgcgcacgcttggtcccgaggccaagtccttgctttcagggctgctcaagaaggaccccaagcagaggcttggcgggggctccgaggacgccaaggagatcatgcagcatcgcttctttgccggtatcgtgtggcagcacgtgtacgagaagaagctcagcccacccttcaagccccaggtcacgtcggagactgacaccaggtattttgatgaggagttcacggcccagatgatcaccatcacaccacctgaccaagatgacagcatggagtgtgtggacagcgagcgcaggccccacttcccccagttctcctactcggccagcggcacggcctgaggcggcggtggactgcgctggacgatagcttggagggatggagaggcggcctcgtgccatgatctgtatttaatggtttttatttctcgggtgcatttgagagaagccacgctgtcctctcgagcccagatggaaagacgtttttgtgctgtgggcagcaccctcccccgcagcggggtagggaagaaaactatcctgcgggttttaatttatttcatccagtttgttctccgggtgtggcctcagccctcagaacaatccgattcacgtagggaaatgttaaggacttctgcagctatgcgcaatgtggcattggggggccgggcaggtcctgcccatgtgtcccctcactctgtcagccagccgccctgggctgtctgtcaccagctatctgtcatctctctggggccctgggcctcagttcaacctggtggcaccagatgcaacctcactatggtatgctggccagcaccctctcctgggggtggcaggcacacagcagccccccagcactaaggccgtgtctctgaggacgtcatcggaggctgggcccctgggatgggaccagggatgggggatgggccagggtttacccagtgggacagaggagcaaggtttaaatttgttattgtgtattatgttgttcaaatgcattttgggggtttttaatctttgtgacaggaaagccctcccccttccccttctgtgtcacagttcttggtgactgtcccaccgggagcctccccctcagatgatctctccacggtagcacttgaccttttcgacgcttaacctttccgctgtcgccccaggccctccctgactccctgtgggggtggccatccctgggcccctccacgcctcctggccagacgctgccgctgccgctgcaccacggcgtttttttacaacattcaactttagtatttttactattataatataatatggaaccttccctccaaattcttcaataaaagttgcttttcaaaaaaaaaaaaaaaaaaaaaa

SEQ ID NO: 517 - DNA, 1294 bp, Artificial Sequence
  TPM1
ggaaggggggcaggagaaaaaagcttttccaaaaaagtattggctgtcttgaggaatgcggtcgcccccttgggaaagtacatatctgggagaagcaggcggctccgcgctcgcactcccgctcctccgcccgaccgcgcgctcgccccgccgctcctgctgcagccccagggcccctcgccgccgccaccatggacgccatcaagaagaagatgcagatgctgaagctcgacaaggagaacgccttggatcgagctgagcaggcggaggccgacaagaaggcggcggaagacaggagcaagcagctggaagatgagctggtgtcactgcaaaagaaactcaagggcaccgaagatgaactggacaaatactctgaggctctcaaagatgcccaggagaagctggagctggcagagaaaaaggccaccgatgctgaagccgacgtagcttctctgaacagacgcatccagctggttgaggaagagttggatcgtgcccaggagcgtctggcaacagctttgcagaagctggaggaagctgagaaggcagcagatgagagtgagagaggcatgaaagtcattgagagtcgagcccaaaaagatgaagaaaaaatggaaattcaggagatccaactgaaagaggccaagcacattgctgaagatgccgaccgcaaatatgaagaggtggcccgtaagctggtcatcattgagagcgacctggaacgtgcagaggagcgggctgagctctcagaaggccaagtccgacagctggaagaacaattaagaataatggatcagaccttgaaagcattaatggctgcagaggataagtactcgcagaaggaagacagatatgaggaagagatcaaggtcctttccgacaagctgaaggaggctgagactcgggctgagtttgcggagaggtcagtaactaaattggagaaaagcattgatgacttagaagacgagctgtacgctcagaaactgaagtacaaagccatcagcgaggagctggaccacgctctcaacgatatgacttccatgtaaacgttcatccactctgcctgcttacaccctgccctcatgctaatataagtttctttgcttcacttctcccaagactccctcgtcgagctggatgtcccacctctctgagctctgcatttgtctattctccagctgaccctggttctctctcttagcatcctgccttagagccaggcacacactgtgctttctattgtacagaagctcttcgtttcagtgtcaaataaacactgtgtaagctaaaaaaa

SEQ ID NO: 518 - DNA, 2587 bp, Artificial Sequence
  DKK3
cgcgcctctgatcgcgttccgggacacacaggcggcggctgcgggcgcagagcggagatgcagcggcttggggccaccctgctgtgcctgctgctggcggcggcggtccccacggcccccgcgcccgctccgacggcgacctcggctccagtcaagcccggcccggctctcagctacccgcaggaggaggccaccctcaatgagatgttccgcgaggttgaggaactgatggaggacacgcagcacaaattgcgcagcgcggtggaagagatggaggcagaagaagctgctgctaaagcatcatcagaagtgaacctggcaaacttacctcccagctatcacaatgagaccaacacagacacgaaggttggaaataataccatccatgtgcaccgagaaattcacaagataaccaacaaccagactggacaaatggtcttttcagagacagttatcacatctgtgggagacgaagaaggcagaaggagccacgagtgcatcatcgacgaggactgtgggcccagcatgtactgccagtttgccagcttccagtacacctgccagccatgccggggccagaggatgctctgcacccgggacagtgagtgctgtggagaccagctgtgtgtctggggtcactgcaccaaaatggccaccaggggcagcaatgggaccatctgtgacaaccagagggactgccagccggggctgtgctgtgccttccagagaggcctgctgttccctgtgtgcacacccctgcccgtggagggcgagctttgccatgaccccgccagccggcttctggacctcatcacctgggagctagagcctgatggagccttggaccgatgcccttgtgccagtggcctcctctgccagccccacagccacagcctggtgtatgtgtgcaagccgaccttcgtggggagccgtgaccaagatggggagatcctgctgcccagagaggtccccgatgagtatgaagttggcagcttcatggaggaggtgcgccaggagctggaggacctggagaggagcctgactgaagagatggcgctgagggagcctgcggctgccgccgctgcactgctgggaggggaagagatttagatctggaccaggctgtgggtagatgtgcaatagaaatagctaatttatttccccaggtgtgtgctttaggcgtgggctgaccaggcttcttcctacatcttcttcccagtaagtttcccctctggcttgacagcatgaggtgttgtgcatttgttcagctcccccaggctgttctccaggcttcacagtctggtgcttgggagagtcaggcagggttaaactgcaggagcagtttgccacccctgtccagattattggctgctttgcctctaccagttggcagacagccgtttgttctacatggctttgataattgtttgaggggaggagatggaaacaatgtggagtctccctctgattggttttggggaaatgtggagaagagtgccctgctttgcaaacatcaacctggcaaaaatgcaacaaatgaattttccacgcagttctttccatgggcataggtaagctgtgccttcagctgttgcagatgaaatgttctgttcaccctgcattacatgtgtttattcatccagcagtgttgctcagctcctacctctgtgccagggcagcattttcatatccaagatcaattccctctctcagcacagcctggggagggggtcattgttctcctcgtccatcagggatctcagaggctcagagactgcaagctgcttgcccaagtcacacagctagtgaagaccagagcagtttcatctggttgtgactctaagctcagtgctctctccactaccccacaccagccttggtgccaccaaaagtgctccccaaaaggaaggagaatgggatttttcttttgaggcatgcacatctggaattaaggtcaaactaattctcacatccctctaaaagtaaactactgttaggaacagcagtgttctcacagtgtggggcagccgtccttctaatgaagacaatgatattgacactgtccctctttggcagttgcattagtaactttgaaaggtatatgactgagcgtagcatacaggttaacctgcagaaacagtacttaggtaattgtagggcgaggattataaatgaaatttgcaaaatcacttagcagcaactgaagacaattatcaaccacgtggagaaaatcaaaccgagcagggctgtgtgaaacatggttgtaatatgcgactgcgaacactgaactctacgccactccacaaatgatgttttcaggtgtcatggactgttgccaccatgtattcatccagagttcttaaagtttaaagttgcacatgattgtataagcatgctttctttgagttttaaattatgtataaacataagttgcatttagaaatcaagcataaatcacttcaactgctcttctgtagttcttggatttcttttcccttttgactttgaataaatgtaaaatcctttcagccagaaaaagtaaaatagaaacaacctgtattaaaaatcttccatagaaaaaaaaaaa

SEQ ID NO: 519 - DNA, 2692 bp, Artificial Sequence
  BAALC
gcggagaggagggacgggctgggagagggcccggactaggggcggcgggcaccgcaggagctccgcgcggctgcagcgcgggcgggagcggggacgcgatgtcgccgccgccgcctccttgcgggccggggctgcgcctccggggctgagccgccgccagagccgacagccgagcagccgctgggcgctcccgcggcgcaggaggatgggctgcggcgggagccgggcggatgccatcgagccccgctactacgagagctggacccgggagacagaatccacctggctcacctacaccgactcggacgcgccgcccagcgccgccgccccggacagcggccccgaagcgggcggcctgcactcgggctaaaagagatgctaagagaatgcctgcaaaagaagtcaccattaatgtaacagatagcatccaacagatggacagaagtcgaagaatcacaaagaactgtgtcaactagcagagagtccaagcagaagggcagatggacttcttcagtgtccttcacggcactggatcccatcaaagaaccttgaagaagtggctgccccttgctggacctgaattctactgagtccctggcaagactgtcttacctggcagcaaactgctgcctgatttgttgggaccttctgagccttctacttatcatgtaaatgtattggcacagtgcttacatatgttaataaactgcaaatgtgcagttcagtttgtctctttgcaactcctgtaatacggtctggtgtaaaagtagtgagttaaagctacaggtcagtttatgaaacagaaaagtaggaatgcattttctgggtgaaagagtcacaccttagtgctataactctcctgcccatgatagtgtattctgtttcaggcaagcttattctttccttctttcattttaaatattgtcattacaaatcttaccaggttcacttaaaagctggctttcatccaactctaaacccacatattgaaaaaatcaaggtacaggaaaactccttgttatccttgtttccttagcttggtatgagacagatcggatccagtttcccatgcaccaacccactgcccatggcatgtctttgggaggtgtctgtgaagcagtcatacctgctcctcatctgcctggaaagtcctcctattccagtgtccatgttggcctccagtccttaatgtcaccatgcttgtggccaatgcatccaaataaggatacccctcagggctcagctagacattgcaattttgcatagctttccagttccctttgcttgtcttcttgactgtcttccctctctatcggggtcacttgcaattgttaatcaaagattgaacactgcgtaggagagggagatgatccagagacatgtggcagcaggcatggcttccccttggcctctctgtacactgccccaggactgtcattttggcatctgcaaaggaatcactttagaaagccagcacctggttgatgtgtattcatactgacattagattgatgtgcactgcattagaaatgaggtagctgacacagaaaaaggatgttttgataggaataattttctagtatgtcttgaaacatgttcatctggaagtattttcctccaaagtaatgtagcatgatttttcaaggattgttaacatgcctgggattgggaaagataggactaaagttgtgccaaactatatcaataaattccatgtttagcagaaataggcagcctattggtgttatgtttatgtaacatagtccagagaactgacatgcaggtcaaaagtcagatacgcaacctccttatctgctaactctgttattcttcaaacacaagtgggtagtgtcatttttccttccttccttccattggcagattgtatatttattcacaaaacattaaatgtccatcctgtgccaggtactatgcagatgttgagggatttggggtctggttagtcgtgactatctatcctgaatctaacagtgacttcataactaggagactgaattagacccttaaggtatagtgtgtgttgcaaatcactctgcaatggaaacttttatattcagggtaggtttgtgtcttaaactaggtgttctaatcaatgtacaagactttaccatacacgcaactatagtttttctaaaccttcatcattttgtgattctttgagaaagggcttttaggaactttatgttctaaaaaatgtttttaacaataataagataaaagaaaaacctgtgattcatatgtccccactggcattactcagcaggagcccccagctgccaaaggttggcagtgatcctgcaagttcaagggctctttctccctggggatgtgctttgtggcttctctttacagctttgtttctgcatcagttcactgctgcatgttgtttggaatttatcaccttaagaaagtgtctctgttttatatagaaacactttctcacttacaggggagaaggaaatgcagggcacatgatctggccctccccagaacaatctggatttcacggagacagcaaccagaagttaaaccatgtgactaaaaatgcatctggctactttttcatgtatgtatgagacagaaactaatccttactatcctattaggataccacttttcattgcaaagtttgtgtcaataaagtcattaattttaaacataaaaaaaaaaa

SEQ ID NO: 520 - DNA, 2409 bp, Artificial Sequence
  ARPP21
agagaagaagcaggcagcttgagacaggtggagctggatcaagctgtgaacgtgatttgctggaagctggttgacgatgtgtcacactgtgtaagggaatcgcatggagatgggcattccgaactgttaatggggacatgggactccagttgtctctgatcacttgtgtggattttcctggcgtagaacgacagaagccgctagtaagtcgccaagacctacagcaggaattctgcaccaaagggcataaaatcttgttattttaatttgcatctgggagaatgtctgagcaaggagacctgaatcaggcaatagcagaggaaggagggactgagcaggagacggccactccagagaacggcattgttaaatcagaaagtctggatgaagaggagaaactggaactgcagaggcggctggaggctcagaatcaagaaagaagaaaatccaagtcaggagcaggaaaaggtaaactgactcgcagccttgctgtctgtgaggaatcttctgccagaccaggaggtgaaagtcttcaggatcagactctctgaaaactgcaaatggaaaggaattcaaaagaatttagattaaaagttaaataaaaagtaggcacagtagtgctgaattttcctcaaaggctctcttttgataaggctgaaccaaatataatcccaagtatcctctctccttccttgttggagatgtcttacctctcagctccccaaaatgcacttgcctataagaaacacaattgctggttcatatgaaacttaggaaatagtgaataaggtgcatttaactttggagaaatacttttatggctttggtggagatttctcaatactgcaaaagttgtccagaaatgaatctgagctgatggtgactttaagttaatattattaatatatcactgcatatttttacccttatttttgctccttacagcaagattagtaggttataaaaatttaaatttaaacaaaattatttcatgacaaaatgggaaacttcacatcatacttatttttgtttgcctttcaggcatcatattagcttttataaaaaatggtcttgctgctgaaattgtacttattttatcagaggctgggtgcagtcaagacaaaagtaaaatggtttacctgagcccaggggagggaaaattgattaagatatcattatttttgtttggtttggttttgcttttttcctcttactttaattgaaatactctgaattcccctcatggaaacagagagcattgagagcactttctttaaaaggaccaaaaataaattcctaatagattttgtcctaagagagtgtttttttttctagcatcattttctttacatgccactcatgtcataaggcatggacaggctatctttcagtggccattactatgtttcgtacacatgctttattttacttgggctctgagaaatgtgtggctttccttcagcattttatttgtgcttctctttttaatggagattgaaaagggagaataatgtgaatatcacggcttatattattaaatgttgattgatggcttgtaatgtactgcacacaatatatgttaactctgcagaatgacagaccctgggagaagtaatgccccagttgtcccccactcctaatgccaggcagagaaggacagcctttatagacttaatctgctttttgtcccatttgacaaggtaccaggaggaaattttttaagggatcaactgtatcacagtgcccactctggacctaagtctagtgtatccatacaattggtgcagagaaataaggtgtaaatggtgctttgttcctgctggttccaagctcagaaaccaagactagctttgtaggagagaatgagagcctgcaagcctctctttggattggctgaggagtggtgggagcagggggttgatagaaaacatccagacacacatataagcaagtggccgtgctacctttttagagaataaagaaacagacttttgagtttatatgcaatgccttcattaggtaccaccggcacttacaaaatgtgcggactgaatcccagagaacactggcagatgtatacagtatatggattgtatcgcttccccaatgtttgtaaattcacagtatttggaaaactgccttcattttccagtgtgggaaaaactcttgctacctgtattacttgatctcagacccatacctgatggttcagtctgtccttaagttaaaagaattttgcttttctaatgttatactatttacctgtcagtgtattactgcaacttgaatcactcttttactgttgttggatataaacttatcctgtaccaatgtatttattaacacttgtattttattattgagcatatcaataaaaatattaaaaaataacagattgttttttaccaa

SEQ ID NO: 521 - DNA, 2300 bp, Artificial Sequence
  MBP
ggacaacaccttcaaagacaggccctctgagtccgacgagctccagaccatccaagaagacagtgcagccacctccgagagcctggatgtgatggcgtcacagaagagaccctcccagaggcacggatccaagtacctggccacagcaagtaccatggaccatgccaggcatggcttcctcccaaggcacagagacacgggcatccttgactccatcgggcgcttctttggcggtgacaggggtgcgcccaagcggggctctggcaaggtaccctggctaaagccgggccggagccctctgccctctcatgcccgcagccagcctgggctgtgcaacatgtacaaggactcacaccacccggcaagaactgctcactacggctccctgccccagaagtcacacggccggacccaagatgaaaaccccgtagtccacttcttcaagaacattgtgacgcctcgcacaccacccccgtcgcagggaaaggggagaggactgtccctgagcagatttagctggggggccgaaggccagagaccaggatttggctacggaggcagagcgtccgactataaatcggctcacaagggattcaagggagtcgatgcccagggcacgctttccaaaatttttaagctgggaggaagagatagtcgctctggatcacccatggctagacgctgaaaacccacctggttccggaatcctgtcctcagcttcttaatataactgccttaaaactttaatcccacttgcccctgttacctaattagagcagatgacccctcccctaatgcctgcggagttgtgcacgtagtagggtcaggccacggcagcctaccggcaatttccggccaacagttaaatgagaacatgaaaacagaaaacggttaaaactgtccctttctgtgtgaagatcacgttccttcccccgcaatgtgcccccagacgcacgtgggtcttcagggggccaggtgcacagacgtccctccacgttcacccctccacccttggactttcttttcgccgtggctgcggcacccttgcgcttttgctggtcactgccatggaggcacacagctgcagagacagagaggacgtgggcggcagagaggactgttgacatccaagcttcctttgtttttttttcctgtccttctctcacctcctaaagtagacttcatttttcctaacaggattagacagtcaaggagtggcttactacatgtgggagcttttggtatgtgacatgcgggctgggcagctgttagagtccaacgtggggcagcacagagagggggccacctccccaggccgtggctgcccacacaccccaattagctgaattcgcgtgtggcagagggaggaaaaggaggcaaacgtgggctgggcaatggcctcacataggaaacagggtcttcctggagatttggtgatggagatgtcaagcaggtggcctctggacgtcaccgttgccctgcatggtggccccagagcagcctctatgaacaacctcgtttccaaaccacagcccacagccggagagtccaggaagacttgcgcactcagagcagaagggtaggagtcctctagacagcctcgcagccgcgccagtcgcccatagacactggctgtgaccgggcgtgctggcagcggcagtgcacagtggccagcactaaccctccctgagaagataaccggctcattcacttcctcccagaagacgcgtggtagcgagtaggcacaggcgtgcacctgctcccgaattactcaccgagacacacgggctgagcagacggccccgtggatggagacaaagagctcttctgaccatatccttcttaacacccgctggcatctcctttcgcgcctccctccctaacctactgacccaccttttgattttagcgcacctgtgattgataggccttccaaagagtcccacgctggcatcaccctccccgaggacggagatgaggagtagtcagcgtgatgccaaaacgcgtcttcttaatccaattctaattctgaatgtttcgtgtgggcttaataccatgtctattaatatatagcctcgatgatgagagagttacaaagaacaaaactccagacacaaacctccaaatttttcagcagaagcactctgcgtcgctgagctgaggtcggctctgcgatccatacgtggccgcacccacacagcacgtgctgtgacgatggctgaacggaaagtgtacactgttcctgaatattgaaataaaacaataaacttttaatggtaaaaaaaaaaaaaaaaaaaaaa

SEQ ID NO: 522 - DNA, 2208 bp, Artificial Sequence
  KIAA0020
atggaagttaaagggaaaaagcaattcacaggaaagaatacaaagacagcacaagaaaaaaacagatttcataaaaatagtgattctggttcttcaaagacatttccaacaaggaaagttgctaaagaaggtggacctaaagtcacatctaggaactttgagaaaagtatcacaaaacttgggaaaaagggtgtaaagcagttcaagaataagcagcaaggggacaaatcaccaaagaacaaattccagccggcaaataaattcaacaagaagagaaaattccagccagatggtagaagcgatgaatcagcagccaagaagcccaaatgggatgacttcaaaaagaagaagaaagaactgaagcaaagcagacaactcagtgataaaaccaactatgacattgttgttcgggcaaagcagatgtgggagattttaagaagaaaagactgtgacaaagaaaaaagagtaaagttaatgagtgatttgcagaagttgattcaagggaaaattaaaactattgcatttgcacacgattcaactcgtgtgatccagtgttacattcagtatggtaatgaagaacagagaaaacaggcttttgaagaattgcgagatgatttggttgagttaagtaaagccaaatattcgagaaatattgttaagaaatttctcatgtatggaagtaaaccacagattgcagagataatcagaagttttaaaggccacgtgaggaagatgctgcggcatgcggaagcatcagccatcgtggagtacgcatacaatgacaaagccattttggagcagaggaacatgctgacggaagagctctatgggaacacatttcagctttacaagtcagcagatcacccaactctggacaaagtgttagagttacagccagaaaaattagaacttattatggatgaaatgaaacagattctaactccaatggcccaaaaggaagctgtgattaagcactcattggtgcataaagtattcttggacttttttacctatgcaccccccaaactcagatcagaaatgattgaagccatccgcgaagcggtggtctacctggcacacacacacgatggcgccagagtggccatgcactgcctgtggcatggcacgcccaaggacaggaaagtgattgtgaaaacaatgaagacttatgttgaaaaggtggctaatggccaatactcccatttggttttactggcggcatttgattgtattgatgatactaagcttgtgaagcagataatcatatcagaaattatcagttcattgcctagcatagtaaatgacaaatatggaaggaaggtcctattgtacttactaagccccagagatcctgcacatacagtacgagaaatcattgaagttctgcaaaaaggagatggaaatgcacacagtaagaaagatacagaggtccgcagacgggagctcctagaatccatttctccagctttgttaagctacctgcaagaacacgcccaagaagtggtgctagataagtctgcgtgtgtgttggtgtctgacattctgggatctgccactggagacgttcagcctaccatgaatgccatcgccagcttggcagcaacaggactgcatcctggtggcaaggacggagagcttcacattgcagaacatcctgcaggacatctagttctgaagtggttaatagagcaagataaaaagatgaaagaaaatgggagagaaggttgttttgcaaaaacacttgtagagcatgttggtatgaagaacctgaagtcctgggctagtgtaaatcgaggtgccattattctttctagcctcctccagagttgtgacctggaagttgcaaacaaagtcaaagctgcactgaaaagcttgattcctacattggaaaaaaccaaaagcaccagcaaaggaatagaaattctacttgaaaaactgagcacataggtggaaagagttaagagcaagatggaatgattttttctgttctctgttctgtttcccaatgcagaaaagaaggggtagggtccaccatactggtaattggggtactctgtatatgtgtttcttctttgtatacgaatctatttatataaattgtttttttaaatggtcttttttaaaaaaaaaaaaaaaaaaaaaaaaaaaaaaaaaaaaaaaaaaaaaaaaaaaaaaaaaaaaaaaaaaaaaaaaaaaaaaaaaaaaaaa

SEQ ID NO: 523 - DNA, 1315 bp, Artificial Sequence
  KYNU
gcagttctttgaatttctcaccctaagatctggcctgtacattttcaaggaattcttgagaggttcttggagagattctgggagccaaacactccattgggatcctagctgttttagagaacaacttgtaatggagccttcatctcttgagctgccggctgacacagtgcagcgcattgcggctgaactcaaatgccacccaacggatgagagggtggctctccacctagatgaggaagataagctgaggcacttcagggagtgcttttatattcccaaaatacaggatctgcctccagttgatttatcattagtgaataaagatgaaaatgccatctatttcttgggaaattctcttggccttcaaccaaaaatggttaaaacatatcttgaagaagaactagataagtgggccaaaatagcagcctatggtcatgaagtggggaagcgtccttggattacaggagatgagagtattgtaggccttatgaaggacattgtaggagccaatgagaaagaaatagccctaatgaatgctttgactgtaaatttacatcttctaatgttatcattttttaagcctacgccaaaacgatataaaattcttctagaagccaaagccttcccttctgatcattatgctattgagtcacaactacaacttcacggacttaacattgaagaaagtatgcggatgataaagccaagagagggggaagaaaccttaagaatagaggatatccttgaagtaattgagaaggaaggagactcaattgcagtgatcctgttcagtggggtgcatttttacactggacagcactttaatattcctgccatcacaaaagctggacaagcgaagggttgttatgttggctttgatctagcacatgcagttggaaatgttgaactctacttacatgactggggagttgattttgcctgctggtgttcctacaagtatttaaatgcaggagcaggaggaattgctggtgccttcattcatgaaaagcatgcccatacgattaaacctgcgagatcggagttctttaattaggaatggaatgcaacagatttggacaagtcaaggacaagagctttagagagaccaaagagtttttcactgttaaagtgtccagtatgtagccgagaaccatatggagaacatcaaatacagtggaacaaatgtaactgctattgatgtcacactttgtgaagtagtctttgttgcttaaaaagggtgacatctagtggctaaacatgttatttcaaataaataatatcgaaataaaaaaaaaaaaaaaaaaaaaaaaaaaaa

SEQ ID NO: 524 - DNA, 1352 bp, Artificial Sequence
  DLK1
ggcagctccccggcagcggcggtggagagcgcagcgcgcagcccggtgcagccctggctttcccctcgctgcgcgcccgcgccccctttcgcgtccgcaaccagaagcccagtgcggcgccaggagccggacccgcgcccgcaccgctcccgggaccgcgaccccggccgcccagagatgaccgcgaccgaagccctcctgcgcgtcctcttgctcctgctggctttcggccacagcacctatggggctgaatgcttcccggcctgcaacccccaaaatggattctgcgaggatgacaatgtttgcaggtgccagcctggctggcagggtcccctttgtgaccagtgcgtgacctctcccggctgccttcacggactctgtggagaacccgggcagtgcatttgcaccgacggctgggacggggagctctgtgatagagatgttcgggcctgctcctcggccccctgtgccaacaacgggacctgcgtgagcctggacgatggcctctatgaatgctcctgtgcccccgggtactcgggaaaggactgccagaaaaaggacgggccctgtgtgatcaacggctccccctgccagcacggaggcacctgcgtggatgatgagggccgggcctcccatgcctcctgcctgtgcccccctggcttctcaggcaatttctgcgagatcgtggccaacagctgcacccccaacccatgcgagaacgacggcgtctgcactgacattgggggcgacttccgctgccggtgcccagccggcttcatcgacaagacctgcagcagccggagcaccgcatcctgaaggtgtccatgaaagagctcaacaagaaaacccctctcctcaccgagggccaggccatctgcttcaccatcctgggcgtgctcaccagcctggtggtgctgggcactgtgggtatcgtcttcctcaacaagtgcgagacctgggtgtccaacctgcgctacaaccacatgctgcggaagaagaagaacctgctgcttcagtacaacagcggggaggacctggccgtcaacatcatcttccccgagaagatcgacatgaccaccttcagcaaggaggccggcgacgaggagatctaagcagcgttcccacagccccctctagattcttggagttccgcagagcttactatacgcggtctgtcctaatctttgtggtgttcgctatctcttgtgtcaaatctggtgaacgctacgcttacatatattgtctttgtgctgctgtgtgacaaacgcaatgcaaaaacaatcctctttctctctcttaatgcatgatacagaataataataagaatttcatctttaaatgagtaagagaaa

SEQ ID NO: 525 - DNA, 1405 bp, Artificial Sequence
  C12orf37
atcttaagaggcgttcctttttgcatagttcccatgagcatgagagaagaagcaatgcacgctccggcagattcctaggaaccaaatacctctgaggagcaccagatttcagcttatgggatgctttgattgctctgtggctgcatttaggagaaggaagctgcagtcatgcgtcatcactgccagcctcacatctcttgacagttaaagccttagggtggagcaagggaaaatttaaaataacaaatgaagcaaaagcaagaggtgatgttccaaagcagaggaaggctaagtttatatatacaaatgtcaagtgtgtatagtgcaaaactaggaccagttggtggaatctgtggtcaaaaacaaaagccttcctttttttttttcaaggcccagtcccaagacgcaagaccacttgcgccagcagcgtgcatcagcaagatagcaaaagcaggacgagagctgcccggaagacatctacctggccagaagacacctaccctggccggaagacatgtacccctgaagatagagaaagaggccatcgtgtactacgtagcagtcatgtcagactgggacacttcctgtttacagaggactataaaacccctgtcctgtcctcacttggggctgacgccatcttaggcctcagcccgcctgcagccaggcgttcgttaaaacagcatgttgctccacaccgccttgtattgtttgttggtcccactctctgggctcgaaccaatacaagcacctttcaagcagtatattcttcagtgtcttgatcctccaaataactctcttctaattcctcctgaccacaaaaagcacttatactctaggatgactgattccagcccagtggcctggcaagggtgaattacaccttgcatatcacactcttgacatttgtgtgcgctagcataagaattataattgaaacagggatttaagtatctcctctctaggtgcctaccctccttggactcaggtcaaatttattaaaggaagttttgtttctagataggttgtttgaaataaaataacagaatgttcaagtaacacagtgtacctacagcttttaacaaaattgaggacttgggtctcgaaacaatttcctttgattttcaggtattttatctataaaaagggagataaagcattagttcataggacagttatatgtttaaatgtgataatgtatattaaccaccttgcatgtattcaaatgtgttttgaaatctaacgtctacattttgatagtttaactcttctacataagtgacttacaacaggcattaaatattgtttggcattttcatatatctgtaactgtatcttaatctacaatgagcttaattttaagtgtagcataaaacagaaccttcaataaagtggtaatattagg

SEQ ID NO: 526 - DNA, 2108 bp, Artificial Sequence
  PART1
gattactcacacagtcttgaagatgcaatgtcagctatttaggacagaaacatccaaggccgtgtcagaactcaattacgactacatatgcattaaggcaggaactggcaggcctcagggtacgccaactataggactcgtgcttctcgtacgctgggctataatctatgaaactgagctccagagccagccaatcacttagctcctcataacaagtctaactggctctggaaagctgaaagggctgcactggaacaacacagatgagatattctacacattaatctacttatctggaatcactttgcctctaaaggccagagaaaaatcacagcttccttgtcggaggggaaaaggacaggtgatctggggaaaacgcagctacacctggagcaaggtctcttcccggcttggcaatctcagctgtgccggcgctacgggacccgagccgtcccagaaaccaaagggcaggcacggcagcaaacgcctgagtgctgctgccttcggtgactatatgagaatggaaacttctaaggaagccaggttgttagaattgttaccccctttactcagagataacatagattatccaggctgagatggaaaacaagccctttattgaattttcaacacagactccctgcttctcatctccttaataaaatttcattaaaatccccttgaactcccatgttcaaatctccatttgttgacagacaaagccaacaatactctaaactgaggcctgcaagtcatttcatttgtatttttgtccagaaatttcccataggaagacttcacctcctacaactccgaagaaaacccttactgtccaagaccgtcaccagcaaccatccgcagtcattcaagtggaagctttcacagcttttgtacattctctgtgtcaatatacaactgagttacagactgtcccctggctccctgacccttacaaacactaaaagttttgtttgactcaacttcaagctgctcatctgttagtaagtgatgttcactccagaacacattcatgatgagaactttctaaaagaccagcactgctcttcccctcctataatcataataatcatgataacctgaaacatgttactgggactcgacatttttctggggattgaaatctttagtccttggagctgtcacatagcaggggcaacctcacactgaaacaaaggaagtgatgtcccattattatccaccctgagccaccataatatgctgtttacatttattttcttcagcctgtgcaaaacaaagcaatggaaaaggaaactaaaaaatatacatactagtaccattatcttcttttgcctaaaattactaatgcaccacgtcagtctgcttccttcaggcatcattctcaattcatcaggacttgtattagcaggttctggctagagagactatctcctgtcatcacgatcaattaatgttttctggtgatcacatcaggccctatctaagaagctcatggtatacaagggtcacccaaatagctgagtgcagtccttgctcatatttccttcatcttaaccccgcaaacaagaattaagatgatcccaataaaagaaaaattgctcaggaaactgaacctttttctgaaccaagcactgtcagcaaatctcaggtattagagcaactatggttgattgaaaagtgtctcaaaatctgggccaagaatgattgctaggtccataagctaatttgtctggccttgccatttacgtaagccaaagaaagtcactcatgagtaaactatagaaaacgttcagacccatcctgttagtatgtcaaatcaactaagactggcagggtattaactccattccaggtgtcatggataaagagccccattattttcacagtgccagcctctacctaaggaaaccctagaccttggaaccagtttcctggtagggaactgctgacagtttcaatgctgacagttggagccaatgcctcatagtgtaaactgaaagaaaaatagttgctttttaaaatgtcagcaagaaggcctgcctcatcttaacaaagcaaaaaaaaatgctttaattcaaattaaaaatcatgatactaaaaaaaaaaaa

SEQ ID NO: 527 - DNA, 5844 bp, Artificial Sequence
  MAP2
agtctggggcgggcgctcgggctgcgcgggctctgggcagcagcagcagcagcagcagcatcctctcttcctttacttcccttccgcttctttctcttccttctccttctttttcccccccctccccttcttcccctaacccttctacccctctcctttttctccggagggcgctaagtccgtgagcggtggcagtcgcgaccgcgggtgcatccagtttctgcgcccagattttattgatctaatccaaagtatcttataacttctggctggaattaagattcttcagcttgtctctaaccgaggaagcattgattgggagctactcattcagaaaattaaaagaaagaagccagaaaatattatcaaccctttgagaacacgacacaacgaactttatattttaccacttccttgaatagttgcaggagaaataacaaggcattgaagaatggcagatgaacggaaagatgaagcaaaggcacctcactggacctcagcaccgctaacagaggcatctgcacactcacatccacctgagattaaggatcaaggcggagcaggggaaggacttgtccgaagcgccaatggattcccatacagggaggatgaagagggtgcctttggagagcatgggtcacagggcacctattcaaataccaaagagaatgggatcaacggagagctgacctcagctgacagagaaacagcagaggaggtgtctgcaaggatagttcaagtagtcactgctgaggctgtagcagtcctgaaaggtgaacaagagaaagaagctcaacataaagaccagactgcagctctgcctttagcagctgaagaaacagctaatctgcctccttctccacccccatcacctgcctcagaacagactgtcacagtggaggaagcagcaggtggggaatcagctctggctcccagtgtatttaaacaggcaaaggacaaagtctctaattctaccttgtcaaagattcctgctttacagggtagcacaaagtccccaagatacagctcagcctgccctagcacgactaaaagggctacattttctgacagtttattaatacagcccacctcagcaggctccacagaccgtttgccatactcaaaatcagggaacaaggacggagtaaccaagagcccagaaaagcgctcttctctcccaagaccttcctccattctccctcctcggcgaggtgtgtcaggagacagagatgagaattccttctctctcaacagttctatctcttcttcagcacggcggaccaccaggtcagagccaattcgcagagcagggaagagtggtacctcaacacccactacccctgggtctactgccatcactcctggcaccccaccaagttattcttcacgcacaccaggcactcctggaacccctagctatcccaggacccctcacacaccaggaacccccaagtctgccatcttggtgccgagtgagaagaaggtcgccatcatacgtactcctccaaaatctcctgcgactcccaagcagcttcggcttattaaccaaccactgccagacctgaagaatgtcaaatccaaaatcggatcaacagacaacatcaaataccagcctaaaggggggcaggttaggattttaaacaagaagatcgattttagcaaagttcagtccagatgtggttccaaggataacatcaaacattcggctgggggcggaaatgtacaaattgttaccaagaaaatagacctaagccatgtgacatccaaatgtggctctctgaagaacatccgccacaggccaggtggcggacgtgtgaaaattgagagtgtaaaactagatttcaaagaaaaggcccaagctaaagttggttctcttgataatgctcatcatgtacctggaggtggtaatgtcaagattgacagccaaaagttgaacttcagagagcatgctaaagcccgtgtggaccatggggctgagatcattacacagtccccaggcagatccagcgtggcatcaccccgacgactcagcaatgtctcctcgtctggaagcatcaacctgctcgaatctcctcagcttgccactttggctgaggatgtcactgctgcactcgctaagcagggcttgtgaatatttctcatttagcattgaaataataatatttaggcatgagctcttggcaggagtgggctctgagcagttgttatattcattctttataaaccataaaataaataatctcatccccaaactgtagtaattgttacaattttctatttaaaaaatgaatagtacatgcagaaattgacctgatttccatttgcaacaggaagacactggctttacatgggttcaattggacaattatttttgctctgctctgttttgcatggagtattattattttaaaaattgcatttttacctttcatgtgcctgaaggctatccactacattctgaaggccttgttaaaatccaagctgctcatttcactattctgtttctgagtgagaagataaaaactgcccattgtaacttatttcaggttaaattaaaccaaggagtctgattgcaggaagggaagagcatgtaagaaataagtttttttaaagtgttattttgtataaatgggaagaaagattcaattaagttattaacatttgggacctggataattatatcagagtatgtcagtccaataaattatttaactaattaaaaaatagttgcaaagcatttgagctgtggttgaggaagtggtgtaaaagtgcatccattaggaatgatgcactttcattaggatggactcgtgtctgattagaatgtcagttgatcagctagatttgtgtccacactaccagtttcacaccccctttccatctgtttgatacagtattatagatataaatatatatatatttctctgtggccatttgtgatacttcctcatatacttgaatattatacttctttattcacagtatctgtgtctcctgcaccctttggtgttgcaattttagatatgtgaaagtagatgttagcagggttctctccctatttaaaaaaaatacattaaaaaagacaaaaaattttagcatgaagttgctttctgtaacaactcaaagccgtaaccctgttttagtgccagatacaagtctctcccgtgatgctagacaaaaaattatttttctttgctttcaccaacatggagtttgtgggggtgggtccagttatacatgaaagggtttacagattgttggtttaagattatggatttatctcatttttaatcacaggatagtttggggtttattcctattattattcatgaaaccgacttaagattttttctttatttttctttttttttccatttgctaaagttgaaagttgaaactaactataatagtttgaaacatgttttctcatttttccaaatagtatctgtttattaaattctctaatagaagatgtttgtctttcttacccaaagtaaagatcccctgatcagaaagaaaaaatacaatactttgggaagctatagctataaaacacttgagacacagatatctaaatcagtttttttccaagactccaacattgcactctgtaaagtaacacactgtgatctagtattatttatcagtagataatactgttctgactgtatatacagtctagaactcacaaatcaattagttcctctcacaaatcattcatcttagacttacaaataaggaatgaaatagtcaatggcctgattaaggcaaagagctaccaggctagatggacactttttaaaaattttatctgttctttttcttgctcagggctggtaggttggatctgaaccattaaaatcaaatggtccactaggcgtatgatctctttgagccaaatcagttcctgaatataaaggaggaaatgatgaggatgtactgaggcaacggggaagtatagaaacatccaagacaaaagccaagggatgcaaaggcagagacacaggtgctttttggtgacccagtggatatggcaaccagtgtaactgccatacaagaaaccctaggagcaaacccacaccactcattctcagctaagagattttacacaggcaaacgtgtcttaaaccatctataaatcagttattttatatgacagtcaaaaccttagaaaccttaggatcattatatctattttctgcctattaattgctgtgaggtttgatttgaccaatctgggcaatttattcatcagcttcccttgaagtgcaccagaaaatagaagaaaggtgtgtggagacttagggtattttattacatgttttcatagtcttaaatagtgattaaatttctctagaaagaagttaacagctcattagaaaagttttaacctgtgaaataagtatttttctcaacattctttaaagtttttatataagttaacactaggtaaacattctgcatactagaagtcagtttattacaaatacatgtcaaaaataaagattatacaaggcaccaaactactagatttggcattaaaacaaatgtttatttctaatcacaacaaaattataatgaataaatgttcttgctttgtatggaaatacaattctttattaaagttaacagaaaggaactgatcgtttgtaccagtaaaagagagaaacacacaggttaaatatcttcttgtggggttaaggggtagaacctatcttgccttcactctcaagataacgactcaaattaagctttttgagcaccactcttgtggggacacacatacgctgatctaggaatgaaatcttcgtggtctcaattctagatctactatgccagtttctctctggctttagcctttgagaacctgtataagaatacgtaagtaatccagagctgtgaagagtttaaaggccaacttctccagtgaactcaacctctgggtcacttgcaaccagaaattggatacctcataatgatgcaggaaagacccgagttcatgatgagtttcaaaggccacgttcatttaggaaccaactctctctggatttacctgctgagttccagcagcgtgatgggctgacatcccacctacaagtatgacacctgtgtaacaccagctaggtacggctggagaaggctgaagagagaatgccattaaatggaagaatgtactgattgtagtgaccttctccacacacacacacacacacacacacacacacacctacagtaatacagcaagcgtggaataatcagccaatatataacattccatcagtattttattaaggaaataacctgaatgtggttgattttgacatagctgcaattacagttttcttctatttttcaagccacaataaggaaaataaactactcatggtctaaatactagagataaagtagattcatggcttggtaaggaaattttaagcattccttcaaagattgacgtgctaaaataagcattgatgttttgagtttttttacacctaggatttttagcttgggtgtgtaggtgaaggccaagactctctgcaggaaaaagcttattttcaaactcagaaaataaaatgtcaatcataaaaatctacttcaactttagcaaaaagaaaaaaaaatcaacaaaaagtatactctgtatgctgggattccgaggttccaacacactgttacaaatctgtggggggtttctttcttctgataattctagagcctgttaccatagaaaggcatttcttcaatggctggttgtagttagttcatgtttttcaatcaaatttgcaaatgtatttgttgctgtatagtgattgttttgcaaaataaaattgcttgtcacct

SEQ ID NO: 528 - DNA, 1678 bp, Artificial Sequence
  VTN
gagcaaacagagcagcagaaaaggcagttcctcttctccagtgccctccttccctgtctctgcctctccctcccttcctcaggcatcagagcggagacttcagggagaccagagcccagcttgccaggcactgagctagaagccctgccatggcacccctgagaccccttctcatactggccctgctggcatgggttgctctggctgaccaagagtcatgcaagggccgctgcactgagggcttcaacgtggacaagaagtgccagtgtgacgagctctgctcttactaccagagctgctgcacagactatacggctgagtgcaagccccaagtgactcgcggggatgtgttcactatgccggaggatgagtacacggtctatgacgatggcgaggagaaaaacaatgccactgtccatgaacaggtggggggcccctccctgacctctgacctccaggcccagtccaaagggaatcctgagcagacacctgttctgaaacctgaggaagaggcccctgcgcctgaggtgggcgcctctaagcctgaggggatagactcaaggcctgagacccttcatccagggagacctcagcccccagcagaggaggagctgtgcagtgggaagcccttcgacgccttcaccgacctcaagaacggttccctctttgccttccgagggcagtactgctatgaactggacgaaaaggcagtgaggcctgggtaccccaagctcatccgagatgtctggggcatcgagggccccatcgatgccgccttcacccgcatcaactgtcaggggaagacctacctcttcaagggtagtcagtactggcgctttgaggatggtgtcctggaccctgattacccccgaaatatctctgacggcttcgatggcatcccggacaacgtggatgcagccttggccctccctgcccatagctacagtggccgggagcgggtctacttcttcaaggggaaacagtactgggagtaccagttccagcaccagcccagtcaggaggagtgtgaaggcagctccctgtcggctgtgtttgaacactttgccatgatgcagcgggacagctgggaggacatcttcgagcttctcttctggggcagaacctctgctggtaccagacagccccagttcattagccgggactggcacggtgtgccagggcaagtggacgcagccatggctggccgcatctacatctcaggcatggcaccccgcccctccttggccaagaaacaaaggtttaggcatcgcaaccgcaaaggctaccgttcacaacgaggccacagccgtggccgcaaccagaactcccgccggccatcccgcgccacgtggctgtccttgttctccagtgaggagagcaacttgggagccaacaactatgatgactacaggatggactggcttgtgcctgccacctgtgaacccatccagagtgtcttcttcttctctggagacaagtactaccgagtcaatcttcgcacacggcgagtggacactgtggaccctccctacccacgctccatcgctcagtactggctgggctgcccagctcctggccatctgtaggagtcagagcccacatggccgggccctctgtagctccctcctcccatctccttcccccagcccaataaaggtcccttagccccgagtttaaa

SEQ ID NO: 529 - DNA, 972 bp, Artificial Sequence
  LOC643923
agacagagccaaaatggaaggcgggacaagggcggcctggctggggcgaggggctggtctgggtccctgggaaccccttgccttgtgggcttcggtctccagggaggagctaggcagccgggctgcggggccgccggactgtggggtcctccgcgcagcgagctgggaggagcggtcggctgggctgttgagctgcgcctcctccaactgctgggaaactccgcacttcaatattggagcatctctttcccgggcaggaaaatacgctgctaacccccagtgggccgtagattggtactatcaattgagtctgtcatttggagagaccaattttgggcaggcatccaggcattgttctgcatctctgcaatgtatacgttttgtgccggtggcttgacaaccgtccttaactggtgctgccaatatggtggaaagcaggaagaagaaataaatgtcttctctgtaagacatcactgtcaagaacactgaaagaagaacccattaacgtagggaacgttgaggactggaacaggttgtagggcgtcttcctacactttgggttataacttccattgcatcaccaccatttaccagtaaaccagcacacacagcaatcagtactcgaaatggttctcttttgcagaaaaagcctgcttttctcccagctttggtgagatagatacgtaatcttcgtaaagacctataaggaattcctctgtggaacaaaattttaagcctccagtacaggatgctgaaagaagcaactctttaatcttgccagcccatgcacagtgaagctgaagtgcttcaatttacagatgttttacatttagggaaggcttttccaacaaagacctaccgcagttacatcacaggctccacctccgcctgccaggctgcttctgcaaggctgttagtaaggatactatgtattgctgtgcttgattaatgaagaaaataaatctccaaatc

SEQ ID NO: 530 - DNA, 5490 bp, Artificial Sequence
  COL3A1
ggctgagttttatgacgggcccggtgctgaagggcagggaacaacttgatggtgctactttgaactgcttttcttttctcctttttgcacaaagagtctcatgtctgatatttagacatgatgagctttgtgcaaaaggggagctggctacttctcgctctgcttcatcccactattattttggcacaacaggaagctgttgaaggaggatgttcccatcttggtcagtcctatgcggatagagatgtctggaagccagaaccatgccaaatatgtgtctgtgactcaggatccgttctctgcgatgacataatatgtgacgatcaagaattagactgccccaacccagaaattccatttggagaatgttgtgcagtttgcccacagcctccaactgctcctactcgccctcctaatggtcaaggacctcaaggccccaagggagatccaggccctcctggtattcctgggagaaatggtgaccctggtattccaggacaaccagggtcccctggttctcctggcccccctggaatctgtgaatcatgccctactggtcctcagaactattctccccagtatgattcatatgatgtcaagtctggagtagcagtaggaggactcgcaggctatcctggaccagctggccccccaggccctcccggtccccctggtacatctggtcatcctggttcccctggatctccaggataccaaggaccccctggtgaacctgggcaagctggtccttcaggccctccaggacctcctggtgctataggtccatctggtcctgctggaaaagatggagaatcaggtagacccggacgacctggagagcgaggattgcctggacctccaggtatcaaaggtccagctgggatacctggattccctggtatgaaaggacacagaggcttcgatggacgaaatggagaaaagggtgaaacaggtgctcctggattaaagggtgaaaatggtcttccaggcgaaaatggagctcctggacccatgggtccaagaggggctcctggtgagcgaggacggccaggacttcctggggctgcaggtgctcggggtaatgacggtgctcgaggcagtgatggtcaaccaggccctcctggtcctcctggaactgccggattccctggatcccctggtgctaagggtgaagttggacctgcagggtctcctggttcaaatggtgcccctggacaaagaggagaacctggacctcagggacacgctggtgctcaaggtcctcctggccctcctgggattaatggtagtcctggtggtaaaggcgaaatgggtcccgctggcattcctggagctcctggactgatgggagcccggggtcctccaggaccagccggtgctaatggtgctcctggactgcgaggtggtgcaggtgagcctggtaagaatggtgccaaaggagagcccggaccacgtggtgaacgcggtgaggctggtattccaggtgttccaggagctaaaggcgaagatggcaaggatggatcacctggagaacctggtgcaaatgggcttccaggagctgcaggagaaaggggtgcccctgggttccgaggacctgctggaccaaatggcatcccaggagaaaagggtcctgctggagagcgtggtgctccaggccctgcagggcccagaggagctgctggagaacctggcagagatggcgtccctggaggtccaggaatgaggggcatgcccggaagtccaggaggaccaggaagtgatgggaaaccagggcctcccggaagtcaaggagaaagtggtcgaccaggtcctcctgggccatctggtccccgaggtcagcctggtgtcatgggcttccccggtcctaaaggaaatgatggtgctcctggtaagaatggagaacgaggtggccctggaggacctggccctcagggtcctcctggaaagaatggtgaaactggacctcagggacccccagggcctactgggcctggtggtgacaaaggagacacaggaccccctggtccacaaggattacaaggcttgcctggtacaggtggtcctccaggagaaaatggaaaacctggggaaccaggtccaaagggtgatgccggtgcacctggagctccaggaggcaagggtgatgctggtgcccctggtgaacgtggacctcctggattggcaggggccccaggacttagaggtggagctggtccccctggtcccgaaggaggaaagggtgctgctggtcctcctgggccacctggtgctgctggtactcctggtctgcaaggaatgcctggagaaagaggaggtcttggaagtcctggtccaaagggtgacaagggtgaaccaggcggtccaggtgctgatggtgtcccagggaaagatggcccaaggggtcctactggtcctattggtcctcctggcccagctggccagcctggagataagggtgaaggtggtgcccccggacttccaggtatagctggacctcgtggtagccctggtgagagaggtgaaactggccctccaggacctgctggtttccctggtgctcctggacagaatggtgaacctggtggtaaaggagaaagaggggctccgggtgagaaaggtgaaggaggccctcctggagttgcaggaccccctggaggttctggacctgctggtcctcctggtccccaaggtgtcaaaggtgaacgtggcagtcctggtggacctggtgctgctggcttccctggtgctcgtggtcttcctggtcctcctggtagtaatggtaacccaggacccccaggtcccagcggttctccaggcaaggatgggcccccaggtcctgcgggtaacactggtgctcctggcagccctggagtgtctggaccaaaaggtgatgctggccaaccaggagagaagggatcgcctggtgcccagggcccaccaggagctccaggcccacttgggattgctgggatcactggagcacggggtcttgcaggaccaccaggcatgccaggtcctaggggaagccctggccctcagggtgtcaagggtgaaagtgggaaaccaggagctaacggtctcagtggagaacgtggtccccctggaccccagggtcttcctggtctggctggtacagctggtgaacctggaagagatggaaaccctggatcagatggtcttccaggccgagatggatctcctggtggcaagggtgatcgtggtgaaaatggctctcctggtgcccctggcgctcctggtcatccaggcccacctggtcctgtcggtccagctggaaagagtggtgacagaggagaaagtggccctgctggccctgctggtgctcccggtcctgctggttcccgaggtgctcctggtcctcaaggcccacgtggtgacaaaggtgaaacaggtgaacgtggagctgctggcatcaaaggacatcgaggattccctggtaatccaggtgccccaggttctccaggccctgctggtcagcagggtgcaatcggcagtccaggacctgcaggccccagaggacctgttggacccagtggacctcctggcaaagatggaaccagtggacatccaggtcccattggaccaccagggcctcgaggtaacagaggtgaaagaggatctgagggctccccaggccacccagggcaaccaggccctcctggacctcctggtgcccctggtccttgctgtggtggtgttggagccgctgccattgctgggattggaggtgaaaaagctggcggttttgccccgtattatggagatgaaccaatggatttcaaaatcaacaccgatgagattatgacttcactcaagtctgttaatggacaaatagaaagcctcattagtcctgatggttctcgtaaaaaccccgctagaaactgcagagacctgaaattctgccatcctgaactcaagagtggagaatactgggttgaccctaaccaaggatgcaaattggatgctatcaaggtattctgtaatatggaaactggggaaacatgcataagtgccaatcctttgaatgttccacggaaacactggtggacagattctagtgctgagaagaaacacgtttggtttggagagtccatggatggtggttttcagtttagctacggcaatcctgaacttcctgaagatgtccttgatgtgcagctggcattccttcgacttctctccagccgagcttcccagaacatcacatatcactgcaaaaatagcattgcatacatggatcaggccagtggaaatgtaaagaaggccctgaagctgatggggtcaaatgaaggtgaattcaaggctgaaggaaatagcaaattcacctacacagttctggaggatggttgcacgaaacacactggggaatggagcaaaacagtctttgaatatcgaacacgcaaggctgtgagactacctattgtagatattgcaccctatgacattggtggtcctgatcaagaatttggtgtggacgttggccctgtttgctttttataaaccaaactctatctgaaatcccaacaaaaaaaatttaactccatatgtgttcctcttgttctaatcttgtcaaccagtgcaagtgaccgacaaaattccagttatttatttccaaaatgtttggaaacagtataatttgacaaagaaaaatgatacttctctttttttgctgttccaccaaatacaattcaaatgctttttgttttatttttttaccaattccaatttcaaaatgtctcaatggtgctataataaataaacttcaacactctttatgataacaacactgtgttatattctttgaatcctagcccatctgcagagcaatgactgtgctcaccagtaaaagataacctttctttctgaaatagtcaaatacgaaattagaaaagccctccctattttaactacctcaactggtcagaaacacagattgtattctatgagtcccagaagatgaaaaaaattttatacgttgataaaacttataaatttcattgattaatctcctggaagattggtttaaaaagaaaagtgtaatgcaagaatttaaagaaatatttttaaagccacaattattttaatattggatatcaactgcttgtaaaggtgctcctcttttttcttgtcattgctggtcaagattactaatatttgggaaggctttaaagacgcatgttatggtgctaatgtactttcacttttaaactctagatcagaattgttgacttgcattcagaacataaatgcacaaaatctgtacatgtctcccatcagaaagattcattggcatgccacaggggattctcctccttcatcctgtaaaggtcaacaataaaaaccaaattatggggctgcttttgtcacactagcatagagaatgtgttgaaatttaactttgtaagcttgtatgtggttgttgatcttttttttccttacagacacccataataaaatatcatattaaaattc

SEQ ID NO: 531 - DNA, 5927 bp, Artificial Sequence
  COL1A1
tcgtcggagcagacgggagtttctcctcggggtcggagcaggaggcacgcggagtgtgaggccacgcatgagcggacgctaaccccctccccagccacaaagagtctacatgtctagggtctagacatgttcagctttgtggacctccggctcctgctcctcttagcggccaccgccctcctgacgcacggccaagaggaaggccaagtcgagggccaagacgaagacatcccaccaatcacctgcgtacagaacggcctcaggtaccatgaccgagacgtgtggaaacccgagccctgccggatctgcgtctgcgacaacggcaaggtgttgtgcgatgacgtgatctgtgacgagaccaagaactgccccggcgccgaagtccccgagggcgagtgctgtcccgtctgccccgacggctcagagtcacccaccgaccaagaaaccaccggcgtcgagggacccaagggagacactggcccccgaggcccaaggggacccgcaggcccccctggccgagatggcatccctggacagcctggacttcccggaccccccggaccccccggacctcccggaccccctggcctcggaggaaactttgctccccagctgtcttatggctatgatgagaaatcaaccggaggaatttccgtgcctggccccatgggtccctctggtcctcgtggtctccctggcccccctggtgcacctggtccccaaggcttccaaggtccccctggtgagcctggcgagcctggagcttcaggtcccatgggtccccgaggtcccccaggtccccctggaaagaatggagatgatggggaagctggaaaacctggtcgtcctggtgagcgtgggcctcctgggcctcagggtgctcgaggattgcccggaacagctggcctccctggaatgaagggacacagaggtttcagtggtttggatggtgccaagggagatgctggtcctgctggtcctaagggtgagcctggcagccctggtgaaaatggagctcctggtcagatgggcccccgtggcctgcctggtgagagaggtcgccctggagcccctggccctgctggtgctcgtggaaatgatggtgctactggtgctgccgggccccctggtcccaccggccccgctggtcctcctggcttccctggtgctgttggtgctaagggtgaagctggtccccaagggccccgaggctctgaaggtccccagggtgtgcgtggtgagcctggcccccctggccctgctggtgctgctggccctgctggaaaccctggtgctgatggacagcctggtgctaaaggtgccaatggtgctcctggtattgctggtgctcctggcttccctggtgcccgaggcccctctggaccccagggccccggcggccctcctggtcccaagggtaacagcggtgaacctggtgctcctggcagcaaaggagacactggtgctaagggagagcctggccctgttggtgttcaaggaccccctggccctgctggagaggaaggaaagcgaggagctcgaggtgaacccggacccactggcctgcccggaccccctggcgagcgtggtggacctggtagccgtggtttccctggcgcagatggtgttgctggtcccaagggtcccgctggtgaacgtggttctcctggccctgctggccccaaaggatctcctggtgaagctggtcgtcccggtgaagctggtctgcctggtgccaagggtctgactggaagccctggcagccctggtcctgatggcaaaactggcccccctggtcccgccggtcaagatggtcgccccggacccccaggcccacctggtgcccgtggtcaggctggtgtgatgggattccctggacctaaaggtgctgctggagagcccggcaaggctggagagcgaggtgttcccggaccccctggcgctgtcggtcctgctggcaaagatggagaggctggagctcagggaccccctggccctgctggtcccgctggcgagagaggtgaacaaggccctgctggctcccccggattccagggtctccctggtcctgctggtcctccaggtgaagcaggcaaacctggtgaacagggtgttcctggagaccttggcgcccctggcccctctggagcaagaggcgagagaggtttccctggcgagcgtggtgtgcaaggtccccctggtcctgctggtccccgaggggccaacggtgctcccggcaacgatggtgctaagggtgatgctggtgcccctggagctcccggtagccagggcgcccctggccttcagggaatgcctggtgaacgtggtgcagctggtcttccagggcctaagggtgacagaggtgatgctggtcccaaaggtgctgatggctctcctggcaaagatggcgtccgtggtctgactggccccattggtcctcctggccctgctggtgcccctggtgacaagggtgaaagtggtcccagcggccctgctggtcccactggagctcgtggtgcccccggagaccgtggtgagcctggtccccccggccctgctggctttgctggcccccctggtgctgacggccaacctggtgctaaaggcgaacctggtgatgctggtgctaaaggcgatgctggtccccctggccctgccggacccgctggaccccctggccccattggtaatgttggtgctcctggagccaaaggtgctcgcggcagcgctggtccccctggtgctactggtttccctggtgctgctggccgagtcggtcctcctggcccctctggaaatgctggaccccctggccctcctggtcctgctggcaaagaaggcggcaaaggtccccgtggtgagactggccctgctggacgtcctggtgaagttggtccccctggtccccctggccctgctggcgagaaaggatcccctggtgctgatggtcctgctggtgctcctggtactcccgggcctcaaggtattgctggacagcgtggtgtggtcggcctgcctggtcagagaggagagagaggcttccctggtcttcctggcccctctggtgaacctggcaaacaaggtccctctggagcaagtggtgaacgtggtccccctggtcccatgggcccccctggattggctggaccccctggtgaatctggacgtgagggggctcctggtgccgaaggttcccctggacgagacggttctcctggcgccaagggtgaccgtggtgagaccggccccgctggaccccctggtgctcctggtgctcctggtgcccctggccccgttggccctgctggcaagagtggtgatcgtggtgagactggtcctgctggtcccgccggtcctgtcggccctgttggcgcccgtggccccgccggaccccaaggcccccgtggtgacaagggtgagacaggcgaacagggcgacagaggcataaagggtcaccgtggcttctctggcctccagggtccccctggccctcctggctctcctggtgaacaaggtccctctggagcctctggtcctgctggtccccgaggtccccctggctctgctggtgctcctggcaaagatggactcaacggtctccctggccccattgggccccctggtcctcgcggtcgcactggtgatgctggtcctgttggtccccccggccctcctggacctcctggtccccctggtcctcccagcgctggtttcgacttcagcttcctgccccagccacctcaagagaaggctcacgatggtggccgctactaccgggctgatgatgccaatgtggttcgtgaccgtgacctcgaggtggacaccaccctcaagagcctgagccagcagatcgagaacatccggagcccagagggcagccgcaagaaccccgcccgcacctgccgtgacctcaagatgtgccactctgactggaagagtggagagtactggattgaccccaaccaaggctgcaacctggatgccatcaaagtcttctgcaacatggagactggtgagacctgcgtgtaccccactcagcccagtgtggcccagaagaactggtacatcagcaagaaccccaaggacaagaggcatgtctggttcggcgagagcatgaccgatggattccagttcgagtatggcggccagggctccgaccctgccgatgtggccatccagctgaccttcctgcgcctgatgtccaccgaggcctcccagaacatcacctaccactgcaagaacagcgtggcctacatggaccagcagactggcaacctcaagaaggccctgctcctccagggctccaacgagatcgagatccgcgccgagggcaacagccgcttcacctacagcgtcactgtcgatggctgcacgagtcacaccggagcctggggcaagacagtgattgaatacaaaaccaccaagacctcccgcctgcccatcatcgatgtggcccccttggacgttggtgccccagaccaggaattcggcttcgacgttggccctgtctgcttcctgtaaactccctccatcccaacctggctccctcccacccaaccaactttccccccaacccggaaacagacaagcaacccaaactgaaccccctcaaaagccaaaaaatgggagacaatttcacatggactttggaaaatatttttttcctttgcattcatctctcaaacttagtttttatctttgaccaaccgaacatgaccaaaaaccaaaagtgcattcaaccttaccaaaaaaaaaaaaaaaaaaagaataaataaataactttttaaaaaaggaagcttggtccacttgcttgaagacccatgcgggggtaagtccctttctgcccgttgggcttatgaaaccccaatgctgccctttctgctcctttctccacaccccccttggggcctcccctccactccttcccaaatctgtctccccagaagacacaggaaacaatgtattgtctgcccagcaatcaaaggcaatgctcaaacacccaagtggcccccaccctcagcccgctcctgcccgcccagcacccccaggccctgggggacctggggttctcagactgccaaagaagccttgccatctggcgctcccatggctcttgcaacatctccccttcgtttttgagggggtcatgccgggggagccaccagcccctcactgggttcggaggagagtcaggaagggccacgacaaagcagaaacatcggatttggggaacgcgtgtcaatcccttgtgccgcagggctgggcgggagagactgttctgttccttgtgtaactgtgttgctgaaagactacctcgttcttgtcttgatgtgtcaccggggcaactgcctgggggcggggatgggggcagggtggaagcggctccccattttataccaaaggtgctacatctatgtgatgggtggggtggggagggaatcactggtgctatagaaattgagatgcccccccaggccagcaaatgttcctttttgttcaaagtctatttttattccttgatatttttctttttttttttttttttttgtggatggggacttgtgaatttttctaaaggtgctatttaacatgggaggagagcgtgtgcggctccagcccagcccgctgctcactttccaccctctctccacctgcctctggcttctcaggcctctgctctccgacctctctcctctgaaaccctcctccacagctgcagcccatcctcccggctccctcctagtctgtcctgcgtcctctgtccccgggtttcagagacaacttcccaaagcacaaagcagtttttccccctaggggtgggaggaagcaaaagactctgtacctattttgtatgtgtataataatttgagatgtttttaattattttgattgctggaataaagcatgtggaaatgacccaaacataa

SEQ ID NO: 532 - DNA, 2937 bp, Artificial Sequence
  ADORA1
gtgcggagcccgattgtcactcagctcctgcgccgggggcgacagagccgcaggcgcccgagtcgagtcccagccagctaccatccctctggagcttaccggccggccttggcttccccaggaatccctggagctagcggctgctgaaggcgtcgaggtgtgggggcacttggacagaacagtcaggcagccgggagctctgccagctttggtgaccttgggccgggctgggagcgctgcggcgggagccggaggactatgagctgccgcgcgttgtccagagcccagcccagccctaccgcgcgcggcccggagctctgttccctggaactttgggcactgcctctgggacccctgccggccagcaggcaggatggtgcttgcctcgtgccccttggtgcccgtctgctgatgtgcccagcctgtgcccgccatgccgccctccatctcagctttccaggccgcctacatcggcatcgaggtgctcatcgccctggtctctgtgcccgggaacgtgctggtgatctgggcggtgaaggtgaaccaggcgctgcgggatgccaccttctgcttcatcgtgtcgctggcggtggctgatgtggccgtgggtgccctggtcatccccctcgccatcctcatcaacattgggccacagacctacttccacacctgcctcatggttgcctgtccggtcctcatcctcacccagagctccatcctggccctgctggcaattgctgtggaccgctacctccgggtcaagatccctctccggtacaagatggtggtgaccccccggagggcggcggtggccatagccggctgctggatcctctccttcgtggtgggactgacccctatgtttggctggaacaatctgagtgcggtggagcgggcctgggcagccaacggcagcatgggggagcccgtgatcaagtgcgagttcgagaaggtcatcagcatggagtacatggtctacttcaacttctttgtgtgggtgctgcccccgcttctcctcatggtcctcatctacctggaggtcttctacctaatccgcaagcagctcaacaagaaggtgtcggcctcctccggcgacccgcagaagtactatgggaaggagctgaagatcgccaagtcgctggccctcatcctcttcctctttgccctcagctggctgcctttgcacatcctcaactgcatcaccctcttctgcccgtcctgccacaagcccagcatccttacctacattgccatcttcctcacgcacggcaactcggccatgaaccccattgtctatgccttccgcatccagaagttccgcgtcaccttccttaagatttggaatgaccatttccgctgccagcctgcacctcccattgacgaggatctcccagaagagaggcctgatgactagaccccgccttccgctcccaccagcccacatccagtggggtctcagtccagtcctcacatgcccgctgtcccaggggtctccctgagcctgccccagctgggctgttggctgggggcatgggggaggctctgaagagatacccacagagtgtggtccctccactaggagttaactaccctacacctctgggccctgcaggaggcctgggagggcaagggtcctacggagggaccaggtgtctagaggcaacagtgttctgagcccccacctgcctgaccatcccatgagcagtccagagcttcagggctgggcaggtcctggggaggctgagactgcagaggagccacctgggctgggagaaggtgcttgggcttctgcggtgaggcaggggagtctgcttgtcttagatgttggtggtgcagccccaggaccaagcttaaggagaggagagcatctgctctgagacggatggaaggagagaggttgaggatgcactggcctgttctgtaggagagactggccagaggcagctaaggggcaggaatcaaggagcctccgttcccacctctgaggactctggaccccaggccataccaggtgctagggtgcctgctctccttgccctgggccagcccaggattgtacgtgggagaggcagaaagggtaggttcagtaatcatttctgatatttgctggagtgctggctccacgccctggggagtgagcttggtgcggtaggtgctggcctcaaacagccacgaggtggtagctctgagccctccttcttgccctgagctttccggggaggagccttggagtgtaattacctgtcatctgggccaccagctccactggcctgcccgttgccgggcctggactgtcctaggtgaccccatctctgctgcttctgggcctgatggagaggagaacactagacatgccaactcgggagcattctgcctgcctgggaacggggtggacgagggagtgtctgtaaggactcagtgttgactgtaggcgcccctggggtgggtttagcaggctgcagcaggcagaggagagtacccccctgagagcatgtgggggaaggccttgctgtcatgtgaatccctcaatacccctagtatctggctgggttttcaggggctttggaagctctgttgcaggtgtccgggggtctaggactttagggatctggggaaggaccaacccatgccctgccaagcctggagcccctgtgttggggggcaaggtgggggagcctggagcccctgtgtgggagggcgaggcgggggagcctggagcccctgtgtgggagggcgaggcgggggatcctggagcccctgtgtcggggggcgagggaggggaggtggccgtcgagttgaccttctgaacatgagtgtcaactccaggacttgcttccaagcccttccctctgttggaaattgggtgtgccctggctcccaagggaggcccatgtgactaataaaaaactgtgaaccctgaaaaaaaaaaaaaaaaaa

SEQ ID NO: 533 - DNA, 936 bp, Artificial Sequence
  CTRB2
agacaggcgtcctacacccctgccagcggcaccatggctttcctctggctcctctcctgctgggccctcctgggtaccaccttcggctgcggggtccccgccatccaccctgtgctcagcggcctgtccaggatcgtgaatggggaggacgccgtccccggctcctggccctggcaggtgtccctgcaggacaaaaccggcttccacttctgcgggggctccctcatcagcgaggactgggtggtcaccgctgcccactgcggggtcaggacctccgacgtggtcgtggctggggagtttgaccagggctctgacgaggagaacatccaggtcctgaagatcgccaaggtcttcaagaaccccaagttcagcattctgaccgtgaacaatgacatcaccctgctgaagctggccacacctgcccgcttctcccagacagtgtccgccgtgtgcctgcccagcgccgacgacgacttccccgcggggacactgtgtgccaccacaggctggggcaagaccaagtacaacgccaacaagacccctgacaagctgcagcaggcagccctgcccctcctgtccaatgccgaatgcaagaagtcctggggcaggaggatcaccgacgtgatgatctgtgccggggccagtggcgtctcctcctgcatgggtgactctggaggccccctggtctgccagaaggacggagcctggaccctggtgggcattgtgtcctggggcagccgcacctgctctaccaccacgcccgctgtgtacgcccgtgtcgccaagctcataccctgggtgcagaagatcctggccgccaactgagcccgcagctcctgccacccctgccttaagatttcccattaaatgcatctgtttagaagccctgaaaaaaaaaaaaaaaaaaaaaaaaaaaaaaaaaaaaaaaaaaaaaaa

SEQ ID NO: 534 - DNA, 2320 bp, Artificial Sequence
  KRT5
tcgacagctctctcgcccagcccagttctggaagggataaaaagggggcatcaccgttcctgggtaacagagccaccttctgcgtcctgctgagctctgttctctccagcacctcccaacccactagtgcctggttctcttgctccaccaggaacaagccaccatgtctcgccagtcaagtgtgtccttccggagcgggggcagtcgtagcttcagcaccgcctctgccatcaccccgtctgtctcccgcaccagcttcacctccgtgtcccggtccgggggtggcggtggtggtggcttcggcagggtcagccttgcgggtgcttgtggagtgggtggctatggcagccggagcctctacaacctggggggctccaagaggatatccatcagcactagtggtggcagcttcaggaaccggtttggtgctggtgctggaggcggctatggctttggaggtggtgccggtagtggatttggtttcggcggtggagctggtggtggctttgggctcggtggcggagctggctttggaggtggcttcggtggccctggctttcctgtctgccctcctggaggtatccaagaggtcactgtcaaccagagtctcctgactcccctcaacctgcaaatcgaccccagcatccagagggtgaggaccgaggagcgcgagcagatcaagaccctcaacaataagtttgcctccttcatcgacaaggtgcggttcctggagcagcagaacaaggttctggacaccaagtggaccctgctgcaggagcagggcaccaagactgtgaggcagaacctggagccgttgttcgagcagtacatcaacaacctcaggaggcagctggacagcatcgtgggggaacggggccgcctggactcagagctgagaaacatgcaggacctggtggaagacttcaagaacaagtatgaggatgaaatcaacaagcgtaccactgctgagaatgagtttgtgatgctgaagaaggatgtagatgctgcctacatgaacaaggtggagctggaggccaaggttgatgcactgatggatgagattaacttcatgaagatgttctttgatgcggagctgtcccagatgcagacgcatgtctctgacacctcagtggtcctctccatggacaacaaccgcaacctggacctggatagcatcatcgctgaggtcaaggcccagtatgaggagattgccaaccgcagccggacagaagccgagtcctggtatcagaccaagtatgaggagctgcagcagacagctggccggcatggcgatgacctccgcaacaccaagcatgagatctctgagatgaaccggatgatccagaggctgagagccgagattgacaatgtcaagaaacagtgcgccaatctgcagaacgccattgcggatgccgagcagcgtggggagctggccctcaaggatgccaggaacaagctggccgagctggaggaggccctgcagaaggccaagcaggacatggcccggctgctgcgtgagtaccaggagctcatgaacaccaagctggccctggacgtggagatcgccacttaccgcaagctgctggagggcgaggaatgcagactcagtggagaaggagttggaccagtcaacatctctgttgtcacaagcagtgtttcctctggatatggcagtggcagtggctatggcggtggcctcggtggaggtcttggcggcggcctcggtggaggtcttgccggaggtagcagtggaagctactactccagcagcagtgggggtgtcggcctaggtggtgggctcagtgtggggggctctggcttcagtgcaagcagtggccgagggctgggggtgggctttggcagtggcgggggtagcagctccagcgtcaaatttgtctccaccacctcctcctcccggaagagcttcaagagctaagaacctgctgcaagtcactgccttccaagtgcagcaacccagcccatggagattgcctcttctaggcagttgctcaagccatgttttatccttttctggagagtagtctagaccaagccaattgcagaaccacattctttggttcccaggagagccccattcccagcccctggtctcccgtgccgcagttctatattctgcttcaaatcagccttcaggtttcccacagcatggcccctgctgacacgagaacccaaagttttcccaaatctaaatcatcaaaacagaatccccaccccaatcccaaattttgttttggttctaactacctccagaatgtgttcaataaaatgcttttataatataaaaaaaaaaaaaaaaaaa

SEQ ID NO: 535 - DNA, 7295 bp, Artificial Sequence
  GABRB2
gcgcggggaagggaagaagaggacgaggtggcgcggagaccgcgggagaacacagtgcctccggaggaaatctgctcggtccccggcagccgccgcttcccctttgatgttttggtacgccgtgcgcatgcgcctcacattagaattactgcactgggcagactaagttggatctcctctcttcagtgaaaccctcaattccatcaaaaactaaagggatgtggagagtgcggaaaaggggctactttgggatttggtccttccccttaataatcgccgctgtctgtgcgcagagtgtcaatgaccctagtaatatgtcgctggttaaagagacggtggatagactcctgaaaggctatgacattcgtctgagaccagattttggaggtccccccgtggctgtggggatgaacattgacattgccagcatcgatatggtttctgaagtcaatatggattataccttgacaatgtactttcaacaagcctggagagataagaggctgtcctataatgtaatacctttaaacttgactctggacaacagagtggcagaccagctctgggtgcctgatacctatttcctgaacgataagaagtcatttgtgcacggagtgactgttaagaaccgcatgattcgcctgcatcctgatggcaccgtcctttatggactcagaatcacaaccacagctgcctgcatgatggacctaaggaggtacccactggatgaacaaaactgcaccttggaaattgagagctatggatacacaactgatgacattgagttttactggcgtggcgatgataatgcagtaacaggagtaacgaaaattgaacttccacagttctctattgtagattacaaacttatcaccaagaaggttgttttttccacaggttcctatcccaggttatccctcagctttaagcttaagagaaacattggctactttatcctgcaaacatacatgccttccatcctgattaccatcctctcctgggtctccttctggattaattacgatgcttcagctgcaagggtggcattaggaatcacaactgtcctcacaatgaccacaatcaacacccacctccgggaaactctccctaaaatcccctatgtgaaggccattgacatgtacctgatggggtgctttgtcttcgttttcatggcccttctggaatatgccctagtcaactacatcttctttgggagggggccccaacgccaaaagaaagcagctgagaaggctgccagtgccaacaatgagaagatgcgcctggatgtcaacaagatggacccccatgagaacatcttactgagcactctcgagataaaaaatgaaatggccacatctgaggctgtgatgggacttggagaccccagaagcacaatgctagcctatgatgcctccagcatccagtatcggaaagctgggttgcccaggcatagttttggccgaaatgctctggaacgacatgtggcgcaaaagaaaagtcgcctgaggagacgcgcctcccaactgaaaatcaccatccctgacttgactgatgtgaatgccatagatcggtggtcccgcatattcttcccagtggttttttccttcttcaacatcgtctattggctttattatgtgaactaaaacatggcctcccactggaagcaaggactagattcctcctcaaaccagttgtacagcctgatgtaggacttggaaaacacatcaatccaggacaaaagtgacgctaaaataccttagttgctggcctatcctgtggtccatttcataccatttgggttgcttctgctaagtaatgaatacactaaggtccttgtggttttccagttaaaacgcaagtgatttttacacatggtggctagacagcctgagtgctccatgttgtctgtttagtatgcagcctactcagaggggaataatttggaagatattcttagaaggctcaacagcattgtcagtcatttggtcataaccagatactcctcatcttcctttttaaggtcggcatgctgttgagatggcattgtccttatgaaacattatctgtaatgccatgcaaacacattacttgaagatgatctatgattttcttactgagatgataatggtgtcatgggaagattattcccactggtttctaaaagattctcttgtgatttgagcaggctaggggaatcaagacagagactcaggaaaccgatttggccagtccctttgcttgagcacggagaatcaactatgatgtctttcattttggcatttagagatgaggagacttctggacaatatcatgcatggtggccaagaaaatttttgctaaacggctatttcctaggtggttaaagtaagagttaacaacacagagcagagtagaaaatcagaaacgacggttgtaacaaaaagcaagcaagcaagaaagcatgacccttatcagctccacacagcatctggtctatacatactgtgtctagtggcagagggtgagtaagagagattgtttttccaacatcactagcttttgacagcatacctaaagaggtttttatagtttaatcgaagataaccatgaaatacaaaaattagagaaatgagaattgtcttagatattcaggttagattcagagtcattcaaatatacaaatacagagcacaaactagcaaacagattgtttttctcagacgaagtcagctgtccctgcaatttttgtccctataattttatttcttaatttaatagagtatttcaagagaaggatttgttcatcactttaaaggattcatggtcctctccagctttttttttgcttccaaaattctgattatattcttaggagactggcaaagtaaggctttggagagattgagtgaactatattttcttatatgcaatgaaattcaccattgtatttttcaaagcaaataatacttcaaggagtatgaacacacagagagttaatttgtgcattcattggtttggggcttgattttcttaagagtgctttcattgtatatgttgcaatctgcctaatcaaggaaaatatgaaaactagtggaaaataataacaaagccacattaacatgataaatgttatgagcctcagttgatattgcagaaaaatatataactgttaatcaggcaggcatgatgtattttttttctatttttaagttatgccattgtgcttctttctacactaattggacataagcattcatatgttggacaagaggagaataagctaatatgtcttccttctatcaatataaggctcatattttgcttttcttatagaaaatagtgaattgctaaattttccttaaagttgaatttgattgaactttttcttggaggatgactttgctatttctattttgaaaacaaagaaagctcttctttttagagtaatatccctaattgtgcatagcagccagtatccacctgtgaataatgtatgttttcttgattccttgtttccttcatgatttagcagcttggaatatgatggagtactattgcccttgcattccagctgtccaagaacaacaacaaacctttatccttcagctttctgaatttgccccaaaatggaatggtattttgtttttcaccagtgtaggaaaccttggccattatattttgattacataatcttgagcacctctgagtatcatctttgggcagaatctgaccaagattcttctcacaggctcagagtagagattcctcatgtttctccaggacacactttctcctaggcaatcattttggggcatcacactaagtaaagtgcctgccccttgtcaacagggggtaaagtttgactaaaaaacatcaggaaggaacatattgataactcaggggcacaactccaaaatgccattctgaaaaggctcttctagagtcaactcagagcccaagtgtagaagtgggctcttatgtgcaatcactgtacaagccataaaaatctttgatattgccatttatgattacaacaaaattttagatgtccaagaaagtcaacagaacaatccagatcaaagtgtagagaagcatctttgcagcttgagcctcaaaagcataaaaccaggaattcatttctgctctcagtgatacaagaaacaaggcaaaggaaaaaagatgggaccttagaagcaatgccctagagtaaaaagcatacattggcactcagtaaccacagagatagaaacaactgactcagcctctccagaaataacagtagatgtagaatttgttcttaaatatatgtttcgttgaaatgaaatgcagtcatcaaatgcgaggaggggtgctagacctgataagtctaggaagaccagtcagcttgatagccagttgttaaactaaaggaccacaaaggtgtgtttagtagttctgatatgggattactatcagtttatacatatgtatagattttcttttaattataaacagccagatagccagcaattaaggtgttttttcatctttgtgaaattcatggacaaattctgactctaaaatgcacagtctacatgaaatctttgatctcaatctgtatatatatatattgtacatgaccgctagtaggtatgaaatgcatttcagagttgaaaactcatgcaacataatcatgtgtttgcataaggaatgttaaaattctttctactacaatttattaacaggggaaaagattcaagcagtgccatctagaccttttctcttctcatttcttcaaaagcagtgctaagtaaaataataataataaaaatggtttatgaaccaaaagactttacattctagcattaggaacacacacaaaaaaatctgtcagcttacaaaagcacaacacataaagaaagagcagtggaatgcgtaatggggaaatgaatcatgtttaaagcaagacttgcattaaattggcaactaagataatttccattttctataggtaaccgtgttccagtttaatgattaccttcatactcaacaagaaaaatggcaaagcaacatcatcaaaataggtcttacaacatatctacatgtatatatgtgtatatatagattcatataaacatacatacatatatatgcattcatatgttggaaaacaaaaggaataagctaatatgttttatttccttcattaaaccagtatatgagtatttttaatttggcaaacaaaaatcaacatactgaaataagtaatacagggtactgagcatttctctatcagcaaatcaatgcctacagtttttatgaaccattgcacagttcaactcgacaatagtactgtaccccagaacatcagaagttaagtagttgtcacattgcttgtctaattgctctctttttcaaggaaacaaataacattgtccattggtgagtcaaaaacaaacatgtcttaagaaaatgaaaaatgataaaaattcctccaaagaggaagaaaaaaaaaaaactaaaccccaccatgttggttagggcaaaatactaagtattcacaactgtagcaatcatgccatttggctaaatgtacagagtacatgtaatgtgagcaaccataactttcactgaacgtgtgtaaatattaaaacagatttcttaaatatttttaacttctaatttgtattttatggtaaggcaatgtgctaattccgtttatggcttaagttgatgtgttataatatgtaaataattaaacatgctgtaaatgaatagtcaatagatacaaataattgtttagtttttttcttaatttttatttattttttactaagtactattactgcagtgcccccagcagagtaatttaaacacccttttgcataaatggtttgggaatcccagacagaagggtttcaatttgctatcacacacacagtcacacacagtcacacacacacacacacacacactcaaacacacataatcttttgctcacccactctgtctctctgcccgtctatgggaaacactctactatttatgtagtcaatataacaaacaagagatagcctttgaaatggcaattgggaaaagcaaaaatgatcattgataacttaatagacttttttatatgtcagagttcaagaaaccaaagtttgcaacttaaatctcagttttcaaacagtaaaagtttgtatagatggcactacagaaaaataaaaatggttattcctaccagctccagaaatgtgttacacaatatacactagaagactttttttttaataatagtattttgtccttaggtagtattgttcctttcaaccaaagactccagaattattgaaaaacaaaaaaggaaaaaaaaaatgagataatgggggaaaaaaaggacgctgcttcacaccaaaggtttaaaaaaatattttccaaatgcactaggaacattgtaaaaaccagaaaggagtgaacagaatgctaatgaagatactgccctaaagaaatctgtacaaaaaaaaaaaaaaaaagcagcactcttaaaaagctactaggtttttggaaattgaagtaaaatatttctgtagatatattcaaaattctgacatcaaattttaatttgcttaaagaagttttatttgtgatgaagatcaatatgattcaaatgatgaaaaacaaaactgtatgtcctttgagttcccaaaccaaatgtcactgccgtgtcacatcctctaatctgatgcccatgtgtgtgtccttgcgccatttgaagcaagttgacagttccatcagtttgtttttgtttttgtttttggttcaataatttgagttcaaccatcgtcattttaaacataattaatcccaacaaagttgcctatagtttaatttaaacctcacagcatttttaatttattttgcatgggtgtttaaatagttctgttacgaatattgtccctgcacagttctaaattgtccttttataaaaaaaaaaagtgatattctagtttcttcacaatgtagtgattatcagccttactaattaccttgtagcctttcttaatatgcacataatgcacattttccgatggctagaaaaatgcaaaacacagtggatatcattgcatctattttcatgtctttctaaaaacaggactattaaaatctctgggatacatgagatagtaaaaaatgaggattataaatgaatagcacataagaattattttcttgaatttaaacttattgcagccagtttcagcatgtaaatatataataatgttggctagtgtgtaattcttgaactaagaaatataaataaaaataaaaagattgtg

SEQ ID NO: 536 - DNA, 822 bp, Artificial Sequence
  IL2
agttccctatcactctctttaatcactactcacagtaacctcaactcctgccacaatgtacaggatgcaactcctgtcttgcattgcactaagtcttgcacttgtcacaaacagtgcacctacttcaagttctacaaagaaaacacagctacaactggagcatttactgctggatttacagatgattttgaatggaattaataattacaagaatcccaaactcaccaggatgctcacatttaagttttacatgcccaagaaggccacagaactgaaacatcttcagtgtctagaagaagaactcaaacctctggaggaagtgctaaatttagctcaaagcaaaaactttcacttaagacccagggacttaatcagcaatatcaacgtaatagttctggaactaaagggatctgaaacaacattcatgtgtgaatatgctgatgagacagcaaccattgtagaatttctgaacagatggattaccttttgtcaaagcatcatctcaacactgacttgataattaagtgcttcccacttaaaacatatcaggccttctatttatttaaatatttaaattttatatttattgttgaatgtatggtttgctacctattgtaactattattcttaatcttaaaactataaatatggatcttttatgattctttttgtaagccctaggggctctaaaatggtttcacttatttatcccaaaatatttattattatgttgaatgttaaatatagtatctatgtagattggttagtaaaactatttaataaatttgataaatataaaaaaaaaaaaaaaaaaaaaaaaaa

SEQ ID NO: 537 - DNA, 4717 bp, Artificial Sequence
  SLC12A1
tacatttcctcagaagaaggctccttggtgctttgaagaacatcctgaagattatatcggagacaatatatcaagaatctatttattgaatcatctagaacaaaagccaggagctccctaatggaagcacattagtgtttattttgatgaagaaatatatagattttttaaaacaaccacaaagtagatagctcagtaaaaaatcaattttggaagatgtcactgaacaactcttccaatgtatttctggattcagtgcccagtaataccaatcgctttcaagttagtgtcataaatgagaaccatgagagcagtgcagctgcagatgacaatactgacccaccacattatgaagaaacctcttttggggatgaagctcagaaaagactcagaatcagctttaggcctgggaatcaggagtgctatgacaatttcctccaaagtggagaaactgctaaaacagatgccagttttcacgcttatgattctcacacaaacacatactatctacaaacttttggccacaacaccatggatgccgttcccaagatagagtactatcgtaacaccggcagcatcagtgggcccaaggtcaaccgacccagcctgcttgagattcacgagcaactcgcaaagaatgtggcagtcaccccaagttcagctgacagagttgctaacggtgatgggatacctggagatgaacaagctgaaaataaggaagatgatcaagctggtgttgtgaagtttggatgggtgaaaggtgtgctggtaagatgcatgctgaacatctggggagtcatgctcttcattcgcctctcctggattgttggagaagctggaattggtcttggagttctcataattcttctttccaccatggtaacttctattactgggttgtcaacttctgcgatagcaactaacgggtttgttcgtggaggtggggcctactatcttatttccagaagtttagggcccgagttcggtgggtcaataggcctgatctttgcttttgctaatgcagtggctgttgctatgtatgtggtgggatttgctgagactgtagtagatcttcttaaggagagtgattcgatgatggtggatccaaccaatgacatccggattataggctccatcacagtggtgattcttctaggaatttcagtagctggaatggaatgggaggcaaaggcccaagtcattcttctggtcattcttctaattgctattgcaaacttcttcattggaactgtcattccatccaacaatgagaaaaagtccagaggtttctttaattaccaagcatcaatatttgcagaaaactttgggccacgcttcacaaagggtgaaggcttcttctctgtctttgccatttttttcccagcagctactgggattcttgctggtgccaatatctcaggagatttggaggatccccaagatgccatccccagaggaaccatgctggccattttcatcaccactgttgcctacttaggggttgcaatttgtgtaggggcctgtgtggtccgagatgccaccgggaacatgaatgacaccatcatttctgggatgaactgcaatggttcagcagcatgtgggttgggctatgacttctcaagatgtcgacatgaaccatgtcagtacgggctgatgaacaatttccaggtcatgagcatggtatcagggttcggccccctcatcactgcgggaatcttttctgcaacactctcctccgccctggcctcccttgtcagcgcacccaaagtgttccaggctctgtgcaaggacaacatctacaaagccctgcagttttttgcaaagggatatgggaaaaacaatgaacccctgagaggatatattctcacttttcttatagccatggcatttattcttattgcggaactgaacaccattgctcccatcatctccaactttttcctggcctcatatgcacttattaatttctcctgcttccatgcctcttatgccaaatctccaggatggagacctgcgtatggaatttacaacatgtgggtatctctttttggagctgttttgtgctgtgcagtcatgtttgtcatcaactggtgggcagctgtcatcacctatgtcattgaattcttcctttacgtctatgtgacttgtaagaagccagatgtgaactggggctcctccacacaggctctttcctacgtgagtgctttagacaatgctctggaattaaccacagtggaagaccacgtaaaaaacttcaggccccagtgcattgtcttaacagggggacccatgacaagacctgctctcctggacataactcacgcctttaccaagaacagtggcctttgcatctgctgtgaagtctttgtgggaccgcgcaaactgtgtgttaaggagatgaacagtggcatggcgaaaaaacaggcctggcttataaagaacaaaatcaaggctttttatgctgcagtggcggcagactgtttcagggatggtgtccgaagtcttcttcaggcctcaggcttaggaagaatgaaaccaaacactctggtgattggatataagaaaaactggaggaaagctcccttgacagagattgagaactacgtgggaatcatacatgatgcatttgattttgagattggcgtggttatagtcagaatcagccaaggatttgacatctctcaggttcttcaggtgcaagaggaattagagagattagaacaggagagactagcattggaagcgactatcaaagataatgagtgtgaagaggaaagtggaggcatccgaggcttgtttaaaaaagctggcaagttgaacattactaagacaacgcctaaaaaagatggcagcattaacacaagccagtcgatgcatgtgggagagttcaaccagaaactggtggaagccagcactcaatttaaaaagaaacaagaaaaaggcacaattgatgtttggtggttgtttgatgatggagggttaacacttcttatcccctatatcttaactctcagaaaaaaatggaaagactgtaaattaagaatctatgtgggagggaagatcaaccgcattgaagaagaaaaaattgtaatggcttcccttctgagcaaatttaggataaaatttgcagacatccatatcatcggtgacatcaacattaggccaaacaaagagagctggaaagtctttgaagagatgattgaaccatatcgtctccatgaaagctgcaaagatttaacaactgctgagaaattaaaaagagaaactccgtggaaaattacagatgcagaactggaagcagtcaaggaaaagagttaccgccaagttcgactgaatgaactcttacaggagcactccagagctgctaatctcattgtcctgagccttcccgtggcaagaaagggatccatatcggatttgttgtatatggcttggttggaaatcctcacaaagaacctcccacctgtcttactagttagaggaaatcacaaaaatgtcttgacattttactcttaaaacatgaaagattggaatacattttaacttaatgtaatgcataattaagaaacatgttccagtactttatgttgtaaatctgatctatggatatgcaaacctctggagaggatcctaccagattctacatacattgcataatttttatcagttaatgcgagcttttttttctcttctcagcttaaggggttgtcaaagccaatgttatccctagaaaaacatttttgtcactgctgttgataaacaagaaaatcaaggaaactcatgttggcttatgctcatgaaaaccaccaatgtgattgtaaacttctccagacaaacttaaccttttgtttcttaattttttgttttgagtgtttgcttctcagccctggtataggtctcagccccacagcaggatctcaataaatgcttattgacaggctggcatagtaaccacaggtggttatcaaaggaaaagaccaataggctggggaacataattatgcttggccccctcagaggcttatacctccaaagcagatttaaaaatcagtaactcaaaactttaagaagtagttgagtctacaaaatattcaaagcagttacctaaataaggttatttaatgtaacagattatatacttaaagtgatctgagcaatcattgataacatatggcttaaatttgctgctgcctgaaaagtatattaactagattagaagacaccatatactccaataaaatgaaatatattctattctcaatatataaactttaattgtactccctatcaaatattttgaaatttccatcacggcattactttgcatatttttttctaattaaatggttagtacagatgaaatctttatagatgactacttgaaaactaagtgctacaaattttcaaaccattattaagaaatatatcctgaatcatatatttagttactttctatagtgattgtatggatttaaaagaataattaaaatgtgaagttgaaaaacttgtaaaatttggaatatacagatactgatttttttcatttttgttagtatacctataatacataatcacattgacaaaccaatgaaaatattgattttctgatgaatggcttgatttttctccttgacatgttttgactgttcattctaactgaaaacatatatgggaaaatatgaacctgaaataaaagcactcaaattcaaaaaaaaaa

SEQ ID NO: 538 - DNA, 5755 bp, Artificial Sequence
  GRIA2
gagtcgcgcacgcgcgcccgggactgcctgcccctctctgtgacttgcctgtgtgtgtgcgtgtgtgtatgtgtgtgtgtgtgtgtgtgtgcgcgcgcgcgtgagtgagagaggagagagggagaagagagcgcgagagagggtgagtgtgtgtgagtgcatgggagggtgctgaatattccgagacactgggaccacagcggcagctccgctgaaaactgcattcagccagtcctccggacttctggagcggggacagggcgcagggcatcagcagccaccagcaggacctgggaaatagggattcttctgcctccacttcaggttttagcagcttggtgctaaattgctgtctcaaaatgcagaggatctaatttgcagaggaaaacagccaaagaaggaagaggaggaaaaggaaaaaaaaaggggtatattgtggatgctctacttttcttggaaatgcaaaagattatgcatatttctgtcctcctttctcctgttttatggggactgatttttggtgtctcttctaacagcatacagataggggggctatttcctaggggcgccgatcaagaatacagtgcatttcgagtagggatggttcagttttccacttcggagttcagactgacaccccacatcgacaatttggaggtggcaaacagcttcgcagtcactaatgctttctgctcccagttttcgagaggagtctatgctatttttggattttatgacaagaagtctgtaaataccatcacatcattttgcggaacactccacgtctccttcatcactcccagcttcccaacagatggcacacatccatttgtcattcagatgagacccgacctcaaaggagctctccttagcttgattgaatactatcaatgggacaagtttgcatacctctatgacagtgacagaggcttatcaacactgcaagctgtgctggattctgctgctgaaaagaaatggcaagtgactgctatcaatgtgggaaacattaacaatgacaagaaagatgagatgtaccgatcactttttcaagatctggagttaaaaaaggaacggcgtgtaattctggactgtgaaagggataaagtaaacgacattgtagaccaggttattaccattggaaaacatgttaaagggtaccactacatcattgcaaatctgggatttactgatggagacctattaaaaatccagtttggaggtgcaaatgtctctggatttcagatagtggactatgatgattcgttggtatctaaatttatagaaagatggtcaacactggaagaaaaagaataccctggagctcacacaacaacaattaagtatacttctgctctgacctatgatgccgttcaagtgatgactgaagccttccgcaacctaaggaagcaaagaattgaaatctcccgaagggggaatgcaggagactgtctggcaaacccagcagtgccctggggacaaggtgtagaaatagaaagggccctcaaacaggttcaggttgaaggtctctcaggaaatataaagtttgaccagaatggaaaaagaataaactatacaattaacatcatggagctcaaaactaatgggccccggaagattggctactggagtgaagtggacaaaatggttgttacccttactgagctcccttctggaaatgacacctctgggcttgagaataagactgttgttgtcaccacaattttggaatctccgtatgttatgatgaagaaaaatcatgaaatgcttgaaggcaatgagcgctatgagggctactgtgttgacctggctgcagaaatcgccaaacattgtgggttcaagtacaagttgacaattgttggtgatggcaagtatggggccagggatgcagacacgaaaatttggaatgggatggttggagaacttgtatatgggaaagctgatattgcaattgctccattaactattacccttgtgagagaagaggtgattgacttctcaaagcccttcatgagcctcgggatatctatcatgatcaagaagcctcagaagtccaaaccaggagtgttttcctttcttgatcctttagcctatgagatctggatgtgcattgtttttgcctacattggggtcagtgtagttttattcctggtcagcagatttagcccctacgagtggcacactgaggagtttgaagatggaagagaaacacaaagtagtgaatcaactaatgaatttgggatttttaatagtctctggttttccttgggtgcctttatgcggcaaggatgcgatatttcgccaagatccctctctgggcgcattgttggaggtgtgtggtggttctttaccctgatcataatctcctcctacacggctaacttagctgccttcctgactgtagagaggatggtgtctcccatcgaaagtgctgaggatctttctaagcaaacagaaattgcttatggaacattagactctggctccactaaagagtttttcaggagatctaaaattgcagtgtttgataaaatgtggacctacatgcggagtgcggagccctctgtgtttgtgaggactacggccgaaggggtggctagagtgcggaagtccaaagggaaatatgcctacttgttggagtccacgatgaacgagtacattgagcaaaggaagccttgcgacaccatgaaagttggtggaaacctggattccaaaggctatggcatcgcaacacctaaaggatcctcattaagaaccccagtaaatcttgcagtattgaaactcagtgagcaaggcgtcttagacaagctgaaaaacaaatggtggtacgataaaggtgaatgtggagccaaggactctggaagtaaggaaaagaccagtgccctcagtctgagcaacgttgctggagtattctacatccttgtcgggggccttggtttggcaatgctggtggctttgattgagttctgttacaagtcaagggccgaggcgaaacgaatgaaggtggcaaagaatgcacagaatattaacccatcttcctcgcagaattcacagaattttgcaacttataaggaaggttacaacgtatatggcatcgaaagtgttaaaatttaggggatgaccttgaatgatgccatgaggaacaaggcaaggctgtcaattacaggaagtactggagaaaatggacgtgttatgactccagaatttcccaaagcagtgcatgctgtcccttacgtgagtcctggcatgggaatgaatgtcagtgtgactgatctctcgtgattgataagaaccttttgagtgccttacacaatggttttcttgtgtgtttattgtcaaagtggtgagaggcatccagtatcttgaagacttttctttcagccaagaattcttaaatatgtggagttcatcttgaattgtaaggaatgattaattaaaacacaacatctttttctactcgagttacagacaaagcgtggtggacatgcacagctaacatggaagtactataatttacctgaagtctttgtacagacaacaaacctgtttctgcagccactattgttagtctcttgattcataatgacttaagcacacttgacatcaactgcatcaagatgtgacatgttttataaaaaaaggaaaaaaaacatttaaaactaaaaaatatttttaggtattttcacaaacaaactggcttttaaataaatttgcttccatattggttgaataagacaaaaacaattaaactgagtgggaagtgaataaaaaaaggctttaggtatcgattccatatttttcaaagccaaatatgtaaatgctaaggaaagtaaacaaagaggagattccaatcttgtaatttaatattgttattaaaactttaatgtatcctattctttaacatttggtgttaatataaaattacttggcaatgcttgacatttgaaataaacatttttctattgttttattgcaagtggtccaattaattttgcttagctacagtttggtcataaatcaagtgagtttaaagacactaccaagttgttaggtgcccagagaaaatttctcccttttaaaaaggccaggtgatttttcaaatgtaatcttgcccccaaagtaatatctgaatatctttttgacatgtctaaatatatatatatataaagaaatatttgttaacacaaaagcatttgatctatgtagataaatgctaatagatttaaaaagctaatattaacaaataccagaatacgtgaagttccatttttaaagtgtttgagcttacagaagagaaacattcattttaaatgaagtaaaaaatgccttgaaagtaattctttagatagttgcccattgattaaattccaaaaactaaatatgtttttagctttaaaattataaaagctgtcataaactttatatattatgaattttaaaatatgtttgagtctcctgcaatatagtttcatcccattgacatcaattaaaaataaccctaatatattatttttatatttattcctcaggtggaatggctattttaatatgcccagtgtggataaaatgtcacatttctgtaacttttgactaaagagcctatatttatctagttaatgaatttaaaggatctatctttcccttcataaaatacctcttatttccattaaagccccccaagtttaattaatttaggattttgaatgattattgacatccaatagttatttttaatatttgtattcttgttatttctggaagaaagcctttgtgtagcacttggtattttgcaaagtgcttttaaaacattcttacttaccgtatttcatagaagggaaggaaaaatgtaaggtttaacagtaagcacttgcattgaacatggaggcatgtggtatcatgatattcttcactaaatttagctgtccctaatcacagatcctaaggtaatataatataattttagtgcatttctcctcatcaggaatgctggaggtgcattttaagttttaataataagtgctagaatgaccaaattgcagactaattgtttccatattgtacttaaaatgagtttttaaaagtgaaaaagaaatgactatatacaatcaatgctatttattgtacctctgggcctactcttctaaaaattgtagcttatcgatttttctctgtcaagcttgaactaatgtaaataattgaaataatgtaaagttatattttcatgtttttatagatacaacatgacaagaatacataatgtaagagtatttcaactatggataatgttgattggataatgcacatctcagttacaagcagtactcatagtttaatatccatgtaacggtgcatcaatatattgctatataaatatgtctgtgtgcatataagtgaaaagtggtcaaacaagagtgatgacagctgtctaaaggtttttttattcattttatataaaaactgttatggaaagaccaaaatgtttatgaactattcttatgtaaatttacaattgtcctttactgtacttttttgtttacagtatagtaccttattttctgctgtgttaagtgggtgtcaaactccaagaagacatacactttctataacttctattgaagatattggaatttccaatttttcatgtgtactatgtcagaaaatgctttcgattttatttttaaatctaacatcggatggcttttccggagtgttgtaaaaacttcaatcatacataaaacatgttcttacaaaaggcaaa

SEQ ID NO: 539 - DNA, 9170 bp, Artificial Sequence
  FLG2
accctgcaagctgcatcaggctttatcctacttgttcctttggtgaaccaggttcacttaaacttgcaaaaagatgaccgacctcttgagaagtgttgtcaccgtaattgatgttttctacaaatacaccaagcaagatggggagtgtggcacactgagcaagggtgaactaaaggaacttctggagaaagagcttcatccagttctgaagaacccagatgatccagacacagtggatgtcatcatgcatatgctggatcgagatcatgacagaagattggactttactgagtttcttttgatgatattcaagctgactatggcctgcaacaaggtcctcagcaaagaatactgcaaagcttcagggtcaaagaagcataggcgtggtcaccgacaccaagaagaagaaagtgaaacagaagaggatgaagaggatacaccaggacataaatcaggttacagacattcaagttggagtgagggagaggagcatggatatagttctgggcactcaaggggaactgtgaaatgtagacatgggtccaactccaggaggctaggaagacaaggtaatttatccagctctgggaaccaagagggatctcagaaaagataccacaggtccagctgtggtcattcatggagtggtggcaaagacagacatggttccagctctgtagaactgagagaaagaataaacaagtcacacattagcccttctagggaatctggggaggagtatgaatctggatctggatcaaacagttgggaaaggaaaggtcatggtggtctgtcatgtggattggagactagtgggcatgaatcaaactctactcagtcaagaattagagaacaaaagcttgggtctagctgttcaggttcaggagacagtgggaggcgaagtcatgcatgtggttatagcaattcaagtgggtgtggaaggccacaaaatgcttcaagttcttgtcagtcacatagatttggagggcaaggaaatcaatttagctatattcagtcaggctgtcagtcaggaattaagggaggacaaggccatggctgtgtctcaggaggtcagccctctggatgtggtcaacctgagtctaacccctgtagtcagtcctatagtcagagaggatatggagctagagaaaatggtcaaccacagaactgtggaggacaatggagaacaggctcaagtcagtcctcttgctgtggacaatatgggtctggaggtagccagtcttgtagtaatggtcaacatgaatatggttcctgtggccgcttttcaaactcttctagttcaaatgaattttccaaatgtgatcaatatgggtctggttcaagtcagtctactagctttgaacaacatggaacaggcttgagtcagtcctctgggttcgaacaacatgtatgtggctcaggtcaaacttgtggccagcatgagtctacatcaagtcaatccttgggctatgaccagcatgggtctagctcaggtaagacatctggctttggacaacatgggtctggctcaggtcagtcctctggctttggacaatgtgggtcaggctcaggtcagtcctctggctttggacagcatgggtctgtctcaggacaatcctctggttttggacagcatgggtctgtctcaggacaatcctctggttttggacaacatgagtctagatcacgtcagtctagctatggccaacatggttctggctcaagtcaatcatctggctatggccaatatgggtctagagagacatctggctttggacaacatgggttgggctcaggtcaatccactggctttggccaatatggatcgggctcaggtcagtcctctggctttggacaacatgggtctggctcaggacaatcctctggctttggacaacatgagtctagatcaggtcagtctagttatggccaacacagttctggctcaagtcagtcatctggctatggccaacatgggtctagacagacatctggctttggacaacatgggtcaggctcaagtcaatccactggctttggccaatatggatcaggctcaggtcagtcctctggctttggacaacatgtttctggctcaggacaatcctctggttttggacaacatgagtctagatcaggtcattctagctatggccaacatggttttggctcaagtcaatcatctggctatggtcaacatgggtcaagttcaggacagacatctggatttggacaacacgagttaagctcaggtcagtcttccagctttggccaacatggatcaggctcaggtcagtcctctggctttggacaacatgggtctggctcaggacaatcctctggctttggacaacatgagtctagatcaggtcagtctagctatggccaacacagttctggctcaagtcagtcatctggctatggccaacatgggtctagacagacatctggctttggacaacatgggtcaggctcaagtcaatccactggctttggccaatatggatcaggctcaggtcagtccgctggctttggacaacatgggtctggctcaggacaatcctctggctttggacagcatgagtctagatcacatcagtccagctatggccaacatggttctggctcaagtcaatcatctggctatggtcaacatgggtcaagttcgggacagacatctggctttggacaacacaggtcaagctcaggtcaatactctggctttggacaacatggatcaggctcaggtcagtccagtggctttggacaacatgggactggctcaggacaatactctggttttggacaacatgagtctagatcacatcagtctagctatggccaacatggttctggctcaagtcagtcatctggctatggtcaacatgggtcaagttcaggacagacttttggatttggacaacacaggtcaggctcaggtcaatcctctggctttggccaacatggatcaggctcaggtcagtcctctggctttggacaacatgagtcaggctcaggaaaatcctctggctttggacagcatgagtctagatcaagtcagtctaattatggccaacatggttctggctcaagtcagtcatctggctatggtcaacatgggtctagttcaggacagacaactggctttggacaacacaggtcaagctcaggccaatactcaggctttggacaacatggatcaggctcagatcagtcctctggctttggacaacatgggactggttcaggacaatcctctggttttggacaatatgagtctagatcacgtcagtctagctatggccaacatggttctggctcaagtcaatcatctggctatggtcaacatgggtcaaattcaggacagacatctggatttggacaacacaggccaggctcaggtcagtcctctggctttggccaatatggatcgggctcaggtcagtcttctggctttggacaacatgggtcaggcacaggtaaatcctctggctttgcacagcatgagtacagatcaggtcagtctagctatggccaacatggtactggctccagtcaatcatctggctgtggccaacatgagtctggctcaggtccaaccacaagttttggacagcatgtgtctggctcagacaatttctctagttctggacaacatatatctgactcaggtcagtccactggatttggccaatatggttcaggctcaggtcaatcaactggcttgggccagggtgaatctcaacaagtagagtcaggatccacagttcatgggagacaggaaactactcatggtcagacaataaataccactagacatagccagtctggtcaaggacaatccacacagacagggtccagggtaactagaagacgaagatctagccaaagtgagaacagtgacagtgaagtgcactcaaaggtctcacacagacattcagaacacattcacacacaagctggatctcactacccaaagtcaggatccacagttcgcagaagacaaggaactactcatggacagagaggagataccactagacatggccattctggtcatggacagtctacacagacaggttccagaacatctggaagacagagatttagccacagtgatgccactgacagtgaagtgcactcaggggtctcacatagaccacactcacaagaacaaactcacagccaagctggatctcaacatggagagtcagaatccacagttcatgagagacatgaaactacttatggacagacaggagaggccactggacatggccactctggtcatggacagtccacacagagagggtccaggacaactggaagaaggggatctggccatagtgagtccagtgacagtgaagtgcactcagggggctcacacagaccacaatcacaagaacaaactcatggccaagccggatctcaacatggagagtcaggatccacagttcatgggagacacggaactactcatggacagacaggagataccactagacatgcccactatcatcatggaaaatccacacagagagggtccagtacaactggaagaaggggatctggccacagtgagtccagtgacagtgaagtgcactcagggggctcgcacacacattcaggacacactcacggccaaagtggatctcaacatggagagtcagaatccataattcatgacagacacagaattactcatggacagacaggagataccactagacattcctactctggtcatgaacaaaccacacagacagggtccaggacaactggaagacagagaactagccacagtgagtccactgacagtgaagtgcactcagggggctcacacagaccacactcacgagaacacacttacggccaagccggatctcaacatgaagagccagaattcacagttcatgagagacacggaactactcatggacagataggagataccactggacattcccactctggtcatggacagtccacacagagagggtccaggacaactggaagacagagatctagccacagtgagtccagtgacagtgaagtgcactcaggggtctcacacacacatacaggacacactcatggtcaagctggatctcaacatggacagtcagaatccatagttcctgagagacatggaactactcatggacagacaggagataccactagacatgcccactatcatcatggattaaccacacagacagggtccaggactactggaagaaggggatctggccacagtgagtacagtgacagtgaagggtactcaggagtctcacatacacattcaggacacactcatggccaagccagatctcaacatggagagtcagaatccatagttcatgagagacatggaactatacatggacagacaggcgataccaccagacatgcccactctggtcatggacagtccacacagacagggtccaggaccactggaagaaggtcatctggccacagtgagtacagtgacagtgaagggcactcagggttctcacaaagaccacactcacgaggacacactcacggccaggctggatctcaacatggagagtcagaatccatagttgacgagagacatggaactactcatggacagacaggagataccagtggacattctcaatctggtcatggacagtccacacagtcaggatccagtacaactggaagaaggagatctggccacagtgagtccagtgacagtgaagtgcactcagggggctcacatacacattcaggacacacacacagccaagccaggtctcaacatggagagtcagaatccacagttcacaagagacaccaaactactcatggacagacaggagataccactgaacatggccaccctagtcatggacaaaccatacagacagggtccaggacaactggaagaaggggatctggccacagtgagtacagtgacagtgaagggccctcaggggtctcacacacacattcaggacacactcacggtcaagctggatctcactatccagagtcaggatcctcagttcatgagagacacggaactactcatggacaaacagcagataccactagacatggccactctggtcatggacagtccacacagagagggtccaggacaactggaagaagggcatctggccacagtgagtacagtgacagtgaagggcactcaggggtctcacacacacattcaggacacgctcatggccaagccggatctcaacatggagagtcaggatcctcagttcatgagagacacggaactactcatggacagacaggagataccactagacatgctcactctggtcatggacagtccacacagagagggtcaaggacagctggaagaaggggatctggccacagtgagtccagtgacagtgaagtgcactcaggggtctcacacacacattcaggacacacttatggccaagccagatctcaacatggagagtcaggatctgccattcacgggagacagggaactatacatggacagacaggagataccactagacatggccagtctggtcatggacagtccacacagacaggttccaggacaactggaagacaaagatctagtcacagtgagtccagtgatagtgaagtgcactcagaggcctcacccacacattcaggacacactcacagccaagccggatctcgacatggacagtcaggatcctcaggtcatgggagacagggaactactcatggacagacaggagataccactagacatgcccactatggttatggacaatccacacagagagggtccaggacaactggaagaaggggatctggccacagtgagtccagtgacagtgaagtgcactcatggggctcacacacacattcaggacacattcagggccaagctggatctcaacaaagacagccaggatccacagttcatgggagactggaaactactcatggacagacaggagataccactagacatggccattctggttatggacaatccacacagacaggttccagatctagtagagcaagtcattttcagtcacatagtagtgaaaggcaaaggcatggatcaagtcaggtttggaaacatggcagctatggacctgcagaatatgactatgggcacactgggtatgggccttctggtggcagcagaaaaagcatcagtaattctcacctttcatggtcaacagacagcactgcaaacaagcaactgtctagacattgacagttattttctagttctgaccttatagtatccaaagcaactaaaagaacaggaagacacagtttaaatcatgaacagtcaatggtaagttatgaacattcagttgattctcagtatcagtctcgacctattattataagaagtcaggaatctagtcatggacattctatagtaactcataaacagtcaaacaacacctatgttcaacctggatataacacagccagaagggagggatgtacacatagccagtcaaatgaccaccttggatttggccatggacaatccatatcagttcatggccattcaaaatctagttcaatcagaaaacaggaatcccatactgataacaaaaagcattcagaagattgggagaaagacactcatgagcaattaggatctaggcatgggaagttagagttcaatacaataggtatacatggatctagccagcaacatttcggagatacaacttttcatgggcaggtaagatccagcacaggttttgccagataggtattaagtcatgggccatcaagagatgcctagggtcagtctggattcagtaccaatgaaagacaagtatacagccatggccaatcaaatgatagttatgagtagtcaaatgacagcaaaagtcaaagatacattttcagtcactttcttgacagccaagaccctgcaggaattgaagagtataggtatagatattcatcaagcagtgcaaccatatgcagtgggggagacaaaggcaagagtcagagtcaagtctgtcaggaggtatcagaatatacggtgaggatgtgggcaaaaaacaaagaggctctgaggccagcggttaccatacaaaggaaagaacaggctctggttccttctgcttagatagcaacaccccactctatgaatatgtccaagaacaaaggagttattactttgaataagaagccaacataaactagcccaagataagaactaacccagagaagaaatgagacacatacatgaaattaaggtatttaacatgatctcctcttttggtagtaagggtatatgtctgttctttcattttaactatagttctgtactatattacttttgtttggtgccaggtgtttttgtaaggctccacattcattgaactccttggttagaaaatagtgaatgaggccgggcgcggtggctcacgcctgtaatcccagcactttgggaggccaagatgggtggatcacgaagtcaggagttcgagaccagcctggccaacatagtgaaatcccgtctctactaaaaatacaaaaattagctgggtgcagtagcgggcacctgtaatcctagctactcaggaggctgaggcaggagaattggttgaacccgggaggcagaggttgcagtgagccgagatcgcaccactgcactccagcctgggtgactgagcaagactccaccttgaaaaaaagaaagaaagaaaatagtgaatggaagaaaaagataaacaccatttggggctatattcagaactatataataaagagagatttgtgtggttgggaataaaattaggttttaaaaaaatttccgaatttcaaaatttggattttccagattttgttttaattaattattgacaaacctatccaaggagctaaatgacgtggtttaggagccaaaacgtctctagaaacattataacacatcccatcctgaacaaagaatgttgtcatagtttcccacatgaatattcagaatatttgcatctttttgtgtcactactggaattctgtacaattatatttaaatttattgtcatggccttctggatataggatccagaaaattgtacttcataaaaattggcaataaacatttcatcaagttaaaaaaaaaaaaaaaaaaaaaaaaaaaaaaaaaaaaaaaaaaaaaaaaa

SEQ ID NO: 540 - DNA, 866 bp, Artificial Sequence
  TNNI3
agtgtcctcggggagtctcaagcagcccggaggagactgacggtccctgggaccctgaaggtcacccgggcggccccctcactgaccctccaaacgcccctgtcctcgccctgcctcctgccattcccggcctgagtctcagcatggcggatgggagcagcgatgcggctagggaacctcgccctgcaccagccccaatcagacgccgctcctccaactaccgcgcttatgccacggagccgcacgccaagaaaaaatctaagatctccgcctcgagaaaattgcagctgaagactctgctgctgcagattgcaaagcaagagctggagcgagaggcggaggagcggcgcggagagaaggggcgcgctctgagcacccgctgccagccgctggagttggccgggctgggcttcgcggagctgcaggacttgtgccgacagctccacgcccgtgtggacaaggtggatgaagagagatacgacatagaggcaaaagtcaccaagaacatcacggagattgcagatctgactcagaagatctttgaccttcgaggcaagtttaagcggcccaccctgcggagagtgaggatctctgcagatgccatgatgcaggcgctgctgggggcccgggctaaggagtccctggacctgcgggcccacctcaagcaggtgaagaaggaggacaccgagaaggaaaaccgggaggtgggagactggcgcaagaacatcgatgcactgagtggaatggagggccgcaagaaaaagtttgagagctgagccttcctgcctactgcccctgccctgaggagggccctgaggaataaagcttctctctgagctgaaaaaaaaaaaaaaaaaaaaaaaaaa

SEQ ID NO: 541 - DNA, 2337 bp, Artificial Sequence
  PITX2
gttaggccaacagggaagcgcggagccgcagatctggtccgtcgctcgcctgggtgcctggagctgagctgcggcaaggcccggctcctgttcgaccgcccgaggggtgtgcgtgtgcgcgttgcggagggtgcgctcagagggccgcgtcgtggctgcagcggctgctgccgccgcaggggatctaatatcacctacctgtccctgtcactcttgacacttctctgtcagggctgccgcgtggggggggggcgggcagagcgcggtcggcgttagctttccttattggaggggttcttgggggagggagggagagaagaagggggtctttgcccactcttgtttcgctttggagcttggaagcctgctccctaaagacgctctgagtggtgcccttctgcccacatcccatgtcttcgtttgcccgctgactttccgtctccggactttttcgcttgagccttccggaggagacgggggcagcttggcttgagaactcggcgggggttgcgtcccctggctctccccgcagcggggaaactccgcgcctagagcgcgacccggagcgggcagcggcggctacgggggctcggcggggcagtagccaaggactagtagagcgtcgcgctccctcgtccatgaactgcatgaaaggcccgcttcacttggagcaccgagcagcggggaccaagctgtcggccgtctcctcatcttcctgtcaccatccccagccgttagccatggcttcggttctggctcccggtcagccccggtcgctggactcctccaagcacaggctggaggtgcacaccatctccgacacctccagcccggaggccgcagagaaagataaaagccagcaggggaagaatgaggacgtgggcgccgaggacccgtctaagaagaagcggcaaaggcggcagcggactcactttaccagccagcagctccaggagctggaggccactttccagaggaaccgctacccggacatgtccacacgcgaagaaatcgctgtgtggaccaaccttacggaagcccgagtccgggtttggttcaagaatcgtcgggccaaatggagaaagagggagcgcaaccagcaggccgagctatgcaagaatggcttcgggccgcagttcaatgggctcatgcagccctacgacgacatgtacccaggctattcctacaacaactgggccgccaagggccttacatccgcctccctatccaccaagagcttccccttcttcaactctatgaacgtcaaccccctgtcatcacagagcatgttttccccacccaactctatctcgtccatgagcatgtcgtccagcatggtgccctcagcagtgacaggcgtcccgggctccagtctcaacagcctgaataacttgaacaacctgagtagcccgtcgctgaattccgcggtgccgacgcctgcctgtccttacgcgccgccgactcctccgtatgtttatagggacacgtgtaactcgagcctggccagcctgagactgaaagcaaagcagcactccagcttcggctacgccagcgtgcagaacccggcctccaacctgagtgcttgccagtatgcagtggaccggcccgtgtgagccgcacccacagcgccgggatcctaggaccttgccggatggggcaactccgcccttgaaagactgggaattatgctagaaggtcgtgggcactaaagaaagggagagaaagagaagctatatagagaaaaggaaaccactgaatcaaagagagagctcctttgatttcaaagggatgtcctcagtgtctgacatctttcactacaagtatttctaacagttgcaaggacacatacacaaacaaatgtttgactggatatgacattttaacattactataagcttgttattttttaagtttagcattgttaacatttaaatgactgaaaggatgtatatatatcgaaatgtcaaattaattttataaaagcagttgttagtaatatcacaacagtgtttttaaaggttaggctttaaaataaagcatgttatacagaagcgattaggatttttcgcttgcgagcaagggagtgtatatactaaatgccacactgtatgtttctaacatattattattattataaaaaatgtgtgaatatcagttttagaatagtttctctggtggatgcaatgatgtttctgaaactgctatgtacaacctaccctgtgtataacatttcgtacaatattattgttttacttttcagcaaatatgaaacaaatgtgttttatttcatgggagtaaaatatactgcatacaaaaaaaaaaaaaaaaaaaaaaaaa

SEQ ID NO: 542 - DNA, 1936 bp, Artificial Sequence
  CYP11A1
agcctgcagcaggaggaaggacgtgaacattttatcagcttctggtatggccttgagctggtagttataatcttggccctggtggcccagggctacagtcatcctagcagtccccgctgaagtggagcaggtacagtcacagctgtggggacagcatgctggccaagggtcttcccccacgctcagtcctggtcaaaggctgccagacctttctgagtgcccccagggaggggctggggcgtctcagggtgcccactggcgagggagctggcatctccacccgcagtcctcgccccttcaatgagatcccctctcctggtgacaatggctggctaaacctgtaccatttctggagggagacgggcacacacaaagtccaccttcaccatgtccagaatttccagaagtatggcccgatttacagggagaagctcggcaacgtggagtcggtttatgtcatcgaccctgaagatgtggcccttctctttaagtccgagggccccaacccagaacgattcctcatcccgccctgggtcgcctatcaccagtattaccagagacccataggagtcctgttgaagaagtcggcagcctggaagaaagaccgggtggccctgaaccaggaggtgatggctccagaggccaccaagaactttttgcccctgttggatgcagtgtctcgggacttcgtcagtgtcctgcacaggcgcatcaagaaggcgggctccggaaattactcgggggacatcagtgatgacctgttccgctttgcctttgagtccatcactaacgtcatttttggggagcgccaggggatgctggaggaagtagtgaaccccgaggcccagcgattcattgatgccatctaccagatgttccacaccagcgtccccatgctcaaccttcccccagacctgttccgtctgttcaggaccaagacctggaaggaccatgtggctgcatgggacgtgattttcagtaaagctgacatatacacccagaacttctactgggaattgagacagaaaggaagtgttcaccacgattaccgtggcatcctctacagactcctgggagacagcaagatgtccttcgaggacatcaaggccaacgtcacagagatgctggcaggaggggtggacacgacgtccatgaccctgcagtggcacttgtatgagatggcacgcaacctgaaggtgcaggatatgctgcgggcagaggtcttggctgcgcggcaccaggcccagggagacatggccacgatgctacagctggtccccctcctcaaagccagcatcaaggagacactaagacttcaccccatctccgtgaccctgcagagatatcttgtaaatgacttggttcttcgagattacatgattcctgccaagacactggtgcaagtggccatctatgctctgggccgagagcccaccttcttcttcgacccggaaaattttgacccaacccgatggctgagcaaagacaagaacatcacctacttccggaacttgggctttggctggggtgtgcggcagtgtctgggacggcggatcgctgagctagagatgaccatcttcctcatcaatatgctggagaacttcagagttgaaatccaacacctcagcgatgtgggcaccacattcaacctcattctgatgcctgaaaagcccatctccttcaccttctggccctttaaccaggaagcaacccagcagtgatcagagaggatggcctgcagccacatgggaggaaggcccaggggtggggcccatggggtctctgcatcttcagtcgtctgtcccaagtcctgctcctttctgcccagcctgctcagcaggttgaatgggttctcagtggtcaccttcctcagctcagctgggccactcctcttcacccaccccatggagacaataaacagctgaaccatgaaaaa

SEQ ID NO: 543 - DNA, 3162 bp, Artificial Sequence
  ECE2
ggggggcggccgcggccgagcgggggtgctgcgcggcggccgtgatggctggtgacggcggggccgggcaggggaccggggccgcggcccgggagcgggccagctgccgggagccctgaatcaccgcctggcccgactccaccatgaacgtcgcgctgcaggagctgggagctggcagcaacgtgggattccagaaggggacaagacagctgttaggctcacgcacgcagctggagctggtcttagcaggtgcctctctactgctggctgcactgcttctgggctgccttgtggccctaggggtccagtaccacagagacccatcccacagcacctgccttacagaggcctgcattcgagtggctggaaaaatcctggagtccctggaccgaggggtgagcccctgtgaggacttttaccagttctcctgtgggggctggattcggaggaaccccctgcccgatgggcgttctcgctggaacaccttcaacagcctctgggaccaaaaccaggccatactgaagcacctgcttgaaaacaccaccttcaactccagcagtgaagctgagcagaagacacagcgcttctacctatcttgcctacaggtggagcgcattgaggagctgggagcccagccactgagagacctcattgagaagattggtggttggaacattacggggccctgggaccaggacaactttatggaggtgttgaaggcagtagcagggacctacagggccaccccattcttcaccgtctacatcagtgccgactctaagagttccaacagcaatgttatccaggtggaccagtctgggctctttctgccctctcgggattactacttaaacagaactgccaatgagaaagtgctcactgcctatctggattacatggaggaactggggatgctgctgggtgggcggcccacctccacgagggagcagatgcagcaggtgctggagttggagatacagctggccaacatcacagtgccccaggaccagcggcgcgacgaggagaagatctaccacaagatgagcatttcggagctgcaggctctggcgccctccatggactggcttgagttcctgtctttcttgctgtcaccattggagttgagtgactctgagcctgtggtggtgtatgggatggattatttgcagcaggtgtcagagctcatcaaccgcacggaaccaagcatcctgaacaattacctgatctggaacctggtgcaaaagacaacctcaagcctggaccgacgctttgagtctgcacaagagaagctgctggagaccctctatggcactaagaagtcctgtgtgccgaggtggcagacctgcatctccaacacggatgacgcccttggctttgctttggggtccctcttcgtgaaggccacgtttgaccggcaaagcaaagaaattgcagaggggatgatcagcgaaatccggaccgcatttgaggaggccctgggacagctggtttggatggatgagaagacccgccaggcagccaaggagaaagcagatgccatctatgatatgattggtttcccagactttatcctggagcccaaagagctggatgatgtttatgacgggtacgaaatttctgaagattctttcttccaaaacatgttgaatttgtacaacttctctgccaaggttatggctgaccagctccgcaagcctcccagccgagaccagtggagcatgaccccccagacagtgaatgcctactaccttccaactaagaatgagatcgtcttccccgctggcatcctgcaggcccccttctatgcccgcaaccaccccaaggccctgaacttcggtggcatcggtgtggtcatgggccatgagttgacgcatgcctttgatgaccaagggcgcgagtatgacaaagaagggaacctgcggccctggtggcagaatgagtccctggcagccttccggaaccacacggcctgcatggaggaacagtacaatcaataccaggtcaatggggagaggctcaacggccgccagacgctgggggagaacattgctgacaacggggggctgaaggctgcctacaatgcttacaaagcatggctgagaaagcatggggaggagcagcaactgccagccgtggggctcaccaaccaccagctcttcttcgtgggatttgcccaggtgtggtgctcggtccgcacaccagagagctctcacgaggggctggtgaccgacccccacagccctgcccgcttccgcgtgctgggcactctctccaactcccgtgacttcctgcggcacttcggctgccctgtcggctcccccatgaacccagggcagctgtgtgaggtgtggtagacctggatcaggggagaaatggccagctgtcaccagacctggggcagctctcctgacaaagctgtttgctcttgggttgggaggaagcaaatgcaagctgggctgggtctagtccctcccccccacaggtgacatgagtacagaccctcctcaatcaccacattgtgcctctgctttgggggtgcccctgcctccagcagagcccccaccattcactgtgacatctttccgtgtcaccctgcctggaagaggtctgggtggggaggccagttcccataggaaggagtctgcctcttctgtccccaggctcactcagcctggcggccatggggcctgccgtgcctgccccactgtgacccacaggcctgggtggtgtacctcctggacttctccccaggctcactcagtgcgcacttaggggtggactcagctctgtctggctcaccctcacgggctacccccacctcaccctgtgctccttgtgccactgctcccagtgctgctgctgaccttcactgacagctcctagtggaagcccaagggcctctgaaagcctcctgctgcccactgtttccctgggctgagaggggaagtgcatatgtgtagcgggtactggttcctgtgtcttagggcacaagccttagcaaatgattgattctccctggacaaagcaggaaagcagatagagcagggaaaaggaagaacagagtttatttttacagaaaagagggtgggagggtgtggtcttggcccttataggaccctgtgccaataaacagacatgcatccgtcaaaaaaaaaaaaaaaa

SEQ ID NO: 544 - DNA, 2969 bp, Artificial Sequence
  ACSM2A
ctctttctgacagtgcagggattctgaagctgtctgcttgagttactgtgctctcttccaaggctgtaggagttctggagctgctggctggagaggagggtggacgaagctctctctagaaagacatcctgagaggacttggcagactccaggttcttcagttttggaactcaaactggctctccttgcacctcagcctgcagatggcctattgtgggaccttgtgatcatgcctgaatatgcattggctgcgaaaagttcagggactttgcaccctgtggggtactcagatgtccagccgcactctctacattaatagtaggcaactggtgtccctgcagtggggccaccaggaagtgccggccaagtttaactttgctagtgatgtgttggatcactgggctgacatggagaaggctggcaagcgactcccaagcccagccctgtggtgggtgaatgggaaggggaaggaattaatgtggaatttcagagaactgagtgaaaacagccagcaggcagccaacgtcctctcgggagcctgtggcctgcagcgtggggatcgtgtggcagtggtgctgccccgagtgcctgagtggtggctggtgatcctgggctgcattcgagcaggtctcatctttatgcctggaaccatccagatgaaatccactgacatactgtataggttgcagatgtctaaggccaaggctattgttgctggggatgaagtcatccaagaagtggacacagtggcatctgaatgtccttctctgagaattaagctactggtgtctgagaaaagctgtgatgggtggctgaacttcaagaaactactaaatgaggcatccaccactcatcactgtgtggagactggaagccaggaagcatctgccatctacttcactagtgggaccagtggtcttcccaagatggcagaacattcctactcgagcctgggcctcaaggccaagatggatgctggttggacaggcctgcaagcctctgatataatgtggaccatatcagacacaggttggatactgaacatcttgtgctcacttatggaaccttgggcattaggagcatgcacatttgttcatctcttgccaaagtttgacccactggttattctaaagacactctccagttatccaatcaagagtatgatgggtgcccccattgtttaccggatgttgctacagcaggatctttccagttacaagttcccccatctacagaactgcgtcactgtaggggagtcccttcttccagaaactctggagaactggagggcccagacaggactggacatccgagaatcctatggccagacagaaacgggattaacttgcatggtttccaagacaatgaaaatcaaaccaggatacatgggaacggctgcttcctgttatgatgtacagatcatagatgataagggcaacgtcctgccccccggcacagaaggagacattggcatcagggtcaaacccatcaggcctataggcatcttctctggctatgtggacaatcccgacaagacagcagccaacattcgaggagacttttggctccttggagaccggggaatcaaagatgaagatgggtatttccagtttatgggacgggcagatgatatcattaactccagcgggtaccggattggaccctcggaggtagagaatgcactgatggagcaccctgctgtggttgagacggctgtgatcagcagcccagaccccgtccgaggagaggtggtgaaggcatttgtggtcctggcctcgcagttcctgtcccatgacccagaacagctcaccaaggagctgcagcagcatgtgaagtcagtgacagccccatacaagtacccaagaaagatagagtttgtcttgaacctgcccaagactgtcacagggaaaattcaacgagccaagcttcgagacaaggagtggaagatgtccggaaaagcccgtgcgcagtgagacatctaagagacattcatttggattcccctcttctttctctttcttttccctttgggcccttggccttcctatgattatatgagattctttatggaagaacatgaatataagttttgtcttgccttggttattagcacaaaactttaccatgttagatgttgaaagaagaaagggaaggaatgagagagagtgaaaaggagagggtaacagaaaaaaaggaaagaaaagtaagtcagggaaatattaaaactgcaagggaaagcaattgaaaaagaaataaagtagggaaagaaggagagaggaagcaagggaaggaggaagaaaggaaagaggagatgaaagggggagaaaagatagaagaaaaataattgaagggagaatcagaaaaataaagagcagaaaggaaagaaataaagagagaaagagaaagaagaaagagcaaaagaacacaagaaagaaagagagggagaaagagagggagaaagggagagaaaaaaattgtaaaaataaaaatagtaaaagaaactgataaagaaaagtaatggaagacaggaagaaaagaagagaaggaagtaaagaggaaaacttataaatattcccacagatagacaaagtcaagcataaaactggagcttgagaaggaaatgaaaggccgtggcaccttcttataccctagaagaagacctccatacaggaagacttgtgtgtggggttgggacattagaatcatccacaagtcaccccaaaccttggaactgtcagggtcagaggggaaccaccatttattaagcatttgccatgtgccaggcactaacccagatgcattataaataccacgttgtttcacctgtgtgtggcatctacagaccttagatcatagctgtgagaacaacgtaagcactgccaaagttatcagctacccatatctcatgtttttgatgttatctactcttcctagaatcaaatattaaaataattttaaaaccaaaaaaa

SEQ ID NO: 545 - DNA, 1953 bp, Artificial Sequence
  RHAG
gttcttatcaacatctcacagcctgtgaagctctcagtgtgcctctgtcctttgccacaaacatgaggttcacattccctctcatggctatagtcctggaaattgccatgattgttttatttggattatttgttgagtatgaaacggaccagactgttctcgagcagctcaacatcaccaagccaacagacatgggcatattctttgagttatatcctctgttccaagatgtacatgttatgatatttgttgggtttggcttcctcatgaccttcctgaagaaatatggcttcagcagtgtgggtatcaacctactcgttgctgctttgggcctccagtggggcactattgtacagggaatcctgcaaagccagggacagaaatttaacattggaatcaaaaacatgataaatgcagacttcagtgcagccacagttctgatatcttttggagctgtcctgggaaaaacgagccccacccaaatgctgatcatgacaattttagaaattgttttctttgcccacaatgaatacctggttagtgaaatatttaaggcctctgacattggagcatcaatgacgatccatgcctttggggcctactttggcttggctgtagcaggcatcttgtatcgatctggactgagaaaggggcatgaaaatgaagagtccgcatactactcagacttgtttgcaatgattgggactctctttctgtggatgttttggcccagctttaactcggccattgctgaacctggagacaaacagtgcagggccattgtaaacacgtacttctctctcgctgcctgtgtgctcacagcctttgccttctccagcctagtggagcaccgaggcaagctcaacatggttcacattcagaatgccacccttgctggaggagttgctgtgggcacttgtgcggatatggcaattcacccatttggttctatgattattgggagcattgcaggaatggtctctgtgcttggatacaagttcctgactccactttttactactaaactgaggatccatgatacatgtggggtccataacctccacggcttacctggtgtagtgggaggccttgcaggcattgtggcagtagcaatgggcgcctccaacacgtctatggccatgcaggcagctgcactgggttcctctatcggaacagcagttgttggaggtctgatgacaggtttaattctaaagttgcctctctggggacagccatctgaccagaactgctatgatgattctgtttattggaaggtccctaagacgagataacttgacaatcagttccatggacatggtgaccacagccagctggaacctgaagtctaaacaccattcctgctctccagcttcctttcccattatccagaatcaagtccaaataaacaaaaagggagtaaccaaagagagtatggaccagagtgaatagatcctaagtcccaaatggccagtgtaaaaatgtccttatgtctgatgctgtctcttgctcttcaatgattaattgaggggatgttactcataaaacagataatcaaatagatcttctccaggattcccaaaaagcttttggcagtgagtaaatacagagtaaacatgtcagtttcttaatgtagacactatgtcttcaatcccaaaaattataaaactgaaacccatgaagcaagaatagatgtgagaaatctatgtaaaaaaataattaaagaaatgcatgtgtgtaaagtagtaatatgatgattttaggtagtgctttttattttaaaaatagtctagttagtaatgttgtatccttgcatgaatattattcttaattccttttgcatgttgactatttgcaacgagctcaaatgctatctgatcaaagtctattttgcataaaatgtccaataattaaatattgttataaaataaaaaaaaaaaaaaaaaaaaaaaaaaa

SEQ ID NO: 546 - DNA, 9510 bp, Artificial Sequence
  CALN1
cggcggcaaggccctgggggatccgctggggaggagctggggaggaggccggagctgcatggagtttctagggcgcgcaactccagcggggcctcggccactgggctccggggcgcagcgaggcagccgcgcacatgggctgaacccgcgcggccagcgggagcgggaggggtagaggagcgcgcggtgcagggggtgcggggcacacgtccccagacgagagcagaggacaaggacagggaggcacgcgcccagatcgcgctccgagtcgacgagggggctcgtgcaggtcccggcgcgcgcgtggggagcggcccgggggcgccgagggagccggcggcagcgaggatgccggcacggggacgcggctgcctgctgggggtgtgagcgagaggctgagcgctgcccgctcggcgcatccattccgcaccgccccctccctgcgggcctcggaggaagccccccgcgctgtgcggaggcgcctcggctgccgggctgcggagccccggcccagcaagagggaaaagatgccgttccaccatgtgaccgccggcttgttgtacaaggggaattacctcaaccgatcgctctctgctggcagtgacagcgaacagctggctaatatctccgtggaggagctcgatgaaatccgagaggcctttcgggttctggaccgggatgggaacggcttcatctccaagcaggagctgggcatggccatgcgctctttggggtacatgccaagcgaggtggagctggccatcatcatgcagcgcttggacatggacggggatggccaggtggattttgatgaattcatgaccattcttggccccaaactggtgtcttcagaaggtcgcgatggttttcttgggaacacgatagacagcatattctggcagtttgacatgcaaaggataactctggaagagttgaagcacattctctatcatgccttccgagaccacctaacgatgaaggacattgagaacatcattatcaatgaggaagagagcctgaatgagacctcggggaactgccaaacagagtttgaaggagtgcattcccagaagcagaacagacagacctgcgtccggaagagcctcatatgcgcctttgctatggccttcatcatcagtgtcatgctgattgcagccaaccagatactccggagcggcatggagtagcagcctcccgccagccacactgtgttgcagctcaccgcgcatgtgcatgccgtgcgggcagactcttcctccacacagcagacacggacctatggactatggatggatgcggacgatggaaccgttcagtaaagaacccaaggttgagtgcaactggggttgcacttcagcttcatctccttggcagggacactaaagggctgtcttcagtgctttaatggttttgttttctaatgcaataaatcgccaggatttccaaattattgcttcaaccatcagtcataactctagagaaaaacttcatcttcatctcggaattccagcagccatccaggtataatggtgagagagcaagagagaggcatgaacacacagtcacctccactccccattctttcaacccaagggtcaacaggagactctctgctgaggtcaaccctcagttccaagaggctgacttcagggttgccacagaagagggggctttccatcccaccctggcttccttcctccacccagtggagacccccccaaggcatgaggggaaagccattaagtggggtgcagccctggcggtcttcagctgcacccctcaccgcttccgttcttactgccttttctagaggactgccattggtagagctggggtgctctcagtttccgtcggcacttggctttctgttcctagagcccatcccgcaccagcattttggaacctgcagagagcctttctcccagctttgccgcctgtgctgccattagagaaaaaaagaagcataatcgtgggcatctctataacatagacagatatatatatttggcttcttcgtgtgtgatgtcattcttccctaatcgcttacacctaatataagcttgtcctccctcccacactcatccctgcttctttggggcaggggtgaggcaggttgaggggggaggggactgggactggcggtgaggttttgatacccacacccagccatctggagtcatggagacccaccacgtctctatgccggatgacctttgtaagttaaggtccttgtgcatcttacctttcccttaccttggagtttgctttgttagtcttccccagctaaaaagagaaatgcaatccaaaatggaaagatggagagatcaaacgactgtattttcacataagatcttctggccttcagattctgcaactgactcattttcaggaggttgggggaaaagatgtttatgagtttagccaacagaacaggtaatttactcctgcctgcagaatacttttcgttggggaagagaactgaatccaaggatctgttttcaacaccattccaagtctgtaatttcctgacttttcctagatgtcagccactactatgaattcaagcttgtgtagtcagattagccagtaatctctagatgtaatagttccctttgtacttttccaagctcaggtctttattttgtaatggaattaccttgctcctacttcttttgattacatcctaaaactacatgcttccccccttccagtagcgagccaccagaagctttcttgtctctatgcagtgggtaggattttttggtgcgttgtgtgttcctgatctccctccctgtcttcctgctcagctttctccctactgccttttcagacttggagcacccaaggtctccaatgaaagttttctcattcacctctgcaagtgctactggcaacagcctgagggcagctgtagaaactttccctctgtgggagactatgaatattcctgatgagcacaagtaaaactaaggcttcagccataatatggaggagggagcagatgtaagctcccaagagcctgggggatcacaggtccctctgcaaaacttcctggagttcagcccagcaaggccagaccaaggaggcagcaacctgcctttcccccttacctgccctgctgcctgcacactgcatgcctgccccttctgctgctcctgttggctgactcaccactgtccccttaggattggaattctcaactagaaccggtccaaatgcagaatattaatacatcgaacaacttcatccttaatctctgccctgggcagtttgccctctcccatctggacttagatgggagggcatagcagatcttgaagggatatactttcctgtttttccctgacccccgaaccacccaaccacatccataggggtgcaggaccctaagtagactgggtagaaaccccagggatgattcttcaaagccccctcctccatgagaggggactgaaatgctgcagctgaggctggtcttcagggcagaaaatgagtacttctttgaaggtggcttttctgcgagttcttctgcctcctgctggagaacagagacccttcaagaggtgagggttagatttcattggcagagagattagccactgtgcaggagtagggaggaaaaggagttctggagaggcgccgccatcctgttttctggaaaggctgcaggattcctttcctaacggtgaccttcttcttgctcccagtgacctggaagcaagcccaccctccccaggggaaaatctaggagaatgcattcctctgcagactgctagagagagatggcaagaaggaagacacagaattctttctgacagcctaggagttatcttcccactgtggtaaccccccatgtggcacccagggactgaaggacacagtgcgtggagacggccctgagctagcggcattccttagacttcaggagctcagagtttgtcccggtgacttgcaccctggctgctttgcttggacagtttgtcttgggtatagggaagccttccttgtcaggcagccaactcccagccctgttcacacaaattttatgctagggccccatgccagtcagtgtccccatcatggtggctatgaagctcacggctgaagattccagaaggtcctggtctcccatgcccaagggatgccatgtagccccagctggaagtgacttccgcaggaattgagagggaatagctcacccctcattctgtcctccggacttaggaaccagtgaccttggctgcccaactgtgtggaggctgagtgattgacaaacacaggttggctcattcttgctgcaagagcaggtaccccccgccgcccccctggaaagcacaagtgatgagcaagaaggcattttccttgggagagaaggggaaatggaccctgacccccttgatccccaaagaagctgcgccccacctttccagatacccacaaagcccccagacagaatctagcatcgggactattagcaatggcttccagaatgtgcttgggtcccacgtgactgatctgacaaaaaaaaaagagggatattaccatggcaacccttgcattccaccctgagtttgccaaggcacacaaaaatagggaacattttcttaaagaacactccaattcagcctgagtgcaacctgactctctgcatctgtatcctgctgggagaggcaattacccttaaagaatctgggtggtatctctgcctttttgtctggcatttgaacttgtccttctatttactcaggagagcaggagctacctgtaagccctggtatctccccatccctactcccagccccttctcccagggtccagagccaggaccccttaatctaggtaaattgacagaaatatcatcttggaaggcaaacaagatattaagcctccaatctttaaaagtatcggtttgcctgttgagcacactcctgcaagccaaacacgtgaactttggtgaactgaggtttaggtgtggtcttaggcaaacccagtggtttcagaaatgtctgggtgttttatttgcagagaacaagatgtgtcttatgagtcttctttctcaatacctgccctgtctcaaatctcacttgacaaatggtctacgatcttgcagttatccaaaagagcctatgaaaaatggacagctgcttttgacaataatgcccctcccaacttcccattcatagaatcataaagcgatatgtttcagaactgagagagaaaagtttaccttttattccaaatgcctcgtactcggtttaagtccagactcaggtcataaatcaaagacagttttgcacgttgctcttcacctaaatctagcagtttccctgaggccctatgagggcatggacagaaaatgaaggatgcaaccacccaggacagctccctggtttgggctggcctggccacgtgtggtcacatgtcctgggatctgtgtttactgtgtccttgctctccttccttgcagaagctgctaagctctgctcctcctaactgcaggtctcaaaccctattgggtcattttgccacactatttctccaaaggcccatagtcattacattttttaccatttcaccaagataacagggggggtctggaattcccctgctaggaagggccccttttcctatatcaccgtgatggtacagatgaactgagatgaaacttttagacttcagcacgtcacacatcctggttgtataaccaggaggtctgcagagctgcaacccctgaagaacatctgtcttaaaagacctcaaatcagaacattctcattggcctcttcagtgatccccatggagctaagagtccgtaacctaaaggccttaccatagccatcttccctccacacctgattgctcaactgccccagaaggggagaatctatctgaaatagaaaagaagcattaaggaccaggtgcggtggctcacacctataatcccagcactttgggaggccaaggcaggtggatcacttaagatcaggagttcaagaccagcctggccaacgtggtgaaaccccatctctactaaaaaaaaaaaatacaaaaattagccaagcatggtgtcgggcacctgtaatcctagctactctggaggctgaggagggagaatcacttgaaccctggaggcggaggctgcagtgagctgagatcgcgccactgcactccagcctgggcaacagagcaaaacttcatctcaaaaaataattttaaaaaagaaacattattcaccagctaagacttttcaatttaaattatttaaagtgacagcaacatagaggagaatttgggctgcctcttaccgacccagtctccatgataatttgagtgtcacaactgttcagcttcacttcatacttgctttgactaagtcactcgggattgtcctcaattttttggccctgccataaataggtgtatgttagtccgttttgcattgctataaaggaataccttaacactgggtaatttataaagaaaagaggtttatttggctcgcagttctgcaggctgtttgagcaaggtatcaacatctgcttggcttctggtgagacctcagaaagctttgacccatggtggaaggtgaagggggagcaggcacgtcacacagcaagaacaggagcaagagagaggagaagaggtgccagtctccttttcttaacaacccgcaattgcatgaactaataaagtaagaattcactcattactacagggagggcaccgagtcattcatgaggaatctgtccctatgacccaaatatctcccagcaggccccacctccagcactggagatcaacatgaaatttggggggaacaaatatccagcctctatgattggtttggagcaatgagatcaattacaccaacaagccaagcatttctcttagtatcctatggtcattgctaatgcatatggtcattttgacagctgtggtttctccttcatattcatttgggactcttcatagggtctcgagagacatgacaatactgttcaaaacgtctccaaggcaaaattaattttattccgttgactggaaatatatcacaaagaatgaggtttttccagtcccacccacaagacagtcctctgaaagtggaaaagcttgcccggccacctgcccctaccctgaccttggggtagttcatcagttgagcacaacccccatgccgggcatagactcacccatctcttttcctcaggtgtgatgggttggctttcaaactagtgtttctcgcactgttagaagttattgtccaagtggaaaggatgcagaggctggaattttccagtgggatagaagagcaggctaattaggaaggaatattccagggaatgcaaggtgcaactgcgatattgctccatccctggacctgagggagacaaagaaagttcttaaagggctgcagatgctgtcctctgaaggtcttctctggatcgctggcctactttggaaacatgcaggccattgagtgccatggggctgcccatcagtctgatccacacgaaaggctctgtgcatttcaagagcaggctggtagctcgccattcctgggaggatgctgacatctgtcaagcccagaatgcctctctcagggctctcagacctgttaaactgaggccaggagagcagaagaaagaactcaaagtgtggacggtactaccagctggagaaagcccaggagccaggactcttccacccactatctaggttatgttgagtgacattcctccctggcttcaggtttctctaaagccagaggaaaagtaaaccagacaagccctcccatctattttgtctgaaacaagatggagtgaatgctccctactgagagggtctggatttcacccatgaattgcactaggaactgggagctcctttttgaacacaagtcccaagaggcagttgtgataaagtctctcttttggtgtccgctgtctgtaaatgaaacaatgcaaattggtgtatgttaaatgtgtcacagcttgcaggcaagaggttttgtttattctctaaggacttgctgactcgagggagcatcaaagatgagctttctgtctgtcttggcaagtgtgaaaataaagggagtcagtcacctccccaaaggtcatgtgaatcagaattcaggagaaagttggaggaaacaatggcagattccaagaagagatgcttgtttctccatttgagaaagccttactgaaagctactgaataaagagcacaatttccagttatttctttctttgcttttttttttttctggccactataacagcacttccagtatatgttgatagtagcttgtaattattcctaataccccagaaagaagagagtcgtgatctttggtgattgtgaggaattagattaacagtcgcgggggaccggctacctgcgacagccctttaaatggctaatgagggatgctgagtgctgagcggtgcctgcttttgatgtggcccacccatgaccagggagagagggcaggaagagagcagctgcaggatccacaagtctctaacccttctgccccaggcaacataaaaccctagattcttgttctttttccctcttcctaaagtagactgacgtcccagtaattgtttttctaacaagccctgttgttctccctgggaaagacctagattggccaagaaaggatcctgtcagctcctggtggagagttgcacaagccagtggctctcaactctctccaaggaaaattaaagcatattttctctttcttagctcaaaatcagctttcaggggtccttattggggtctgattttcttccccagttctgaatccaggaagaagctttttctccaaggaccaaccaaaaacaatgactttggagaaaaattagactcagaaagtctgtccaggcattgggttggtgaactgtcaactgttggatggggaggaggggtcgctgtgatcgtagcggtcattagacttgggacgtgagttgtctctcaaagcacagtagtaaatgactgtattttgtatattgcccccaatatgttgggtgtaaatagaagcacagctggggattgatcatggccaggacgattggagcttggcagctctcatatccagaataagccactaagacggaactcatcaatcaccatcttcccatttacctcattagcatcccattttctctcattcagtattagttgatgatttctgctattaagtgatgagaaagtcagcagactagtcaaaaaagaatctttatataaaatgtacatattaatataaattaacttagcatgcaacttaccgatcaaatgaagtatatattattaatatgttatcttagtgtataaaggaaaactgccatatttaccagatgttttctttaaccgaacttgtctgtaaatatataatctgtataaaaagagtctaatttaccattatttatgcaatagaaaaaataaaagtttttttttcttttgaaaaaaaaaaaaaaaaaaaaaaaaaaaaaaaaaaaaaaaa

SEQ ID NO: 547 - DNA, 1666 bp, Artificial Sequence
  CA2
cctccccttgtcgcctaggtccacccgagccccctcccccgggccgcccccgagcacgaagttggcgggagcctataaaagctggtgccggcgcgacccgcggacacacagtgcaggcgcccaagccgccgccgccagatcggtgccgattcctgccctgccccgaccgccagcgcgaccatgtcccatcactgggggtacggcaaacacaacggacctgagcactggcataaggacttccccattgccaagggagagcgccagtcccctgttgacatcgacactcatacagccaagtatgacccttccctgaagcccctgtctgtttcctatgatcaagcaacttccctgaggatcctcaacaatggtcatgctttcaacgtggagtttgatgactctcaggacaaagcagtgctcaagggaggacccctggatggcacttacagattgattcagtttcactttcactggggttcacttgatggacaaggttcagagcatactgtggataaaaagaaatatgctgcagaacttcacttggttcactggaacaccaaatatggggattttgggaaagctgtgcagcaacctgatggactggccgttctaggtatttttttgaaggttggcagcgctaaaccgggccttcagaaagttgttgatgtgctggattccattaaaacaaagggcaagagtgctgacttcactaacttcgatcctcgtggcctccttcctgaatccttggattactggacctacccaggctcactgaccacccctcctcttctggaatgtgtgacctggattgtgctcaaggaacccatcagcgtcagcagcgagcaggtgttgaaattccgtaaacttaacttcaatggggagggtgaacccgaagaactgatggtggacaactggcgcccagctcagccactgaagaacaggcaaatcaaagcttccttcaaataagatggtcccatagtctgtatccaaataatgaatcttcgggtgtttccctttagctaagcacagatctaccttggtgatttggaccctggttgctttgtgtctagttttctagacccttcatctcttacttgatagacttactaataaaatgtgaagactagaccaattgtcatgcttgacacaactgctgtggctggttggtgctttgtttatggtagtagtttttctgtaacacagaatataggataagaaataagaataaagtaccttgactttgttcacagcatgtagggtgatgagcactcacaattgttgactaaaatgctgcttttaaaacataggaaagtagaatggttgagtgcaaatccatagcacaagataaattgagctagttaaggcaaatcaggtaaaatagtcatgattctatgtaatgtaaaccagaaaaaataaatgttcatgatttcaagatgttatattaaagaaaaactttaaaaattattatatatttatagcaaagttatcttaaatatgaattctgttgtaatttaatgacttttgaattacagagatataaatgaagtattatctgtaaaaattgttataattagagttgtgatacagagtatatttccattcagacaatatatcataacttaataaatattgtattttagatatattctctaataaaattcagaattct

SEQ ID NO: 548 - DNA, 5195 bp, Artificial Sequence
  GRIA3
agagatcctgggagcgagagggagagagagggagcaagaaaggaagagagagcgagcgagagagagcgagcgaataagagagagagtaagagggagagagaagaagaggaagaagaggaggcggcggcagcggaggaggaggaggactagtgtggggtggaaaggaagagtgagcgagagcaagttaaggggagggggtgtaagagccagcgaattctttttctttttctattattattttgacgactcctgagttgcgcccatgctcttgtcagcttcgttttaggcgtagcatggccaggcagaagaaaatggggcaaagcgtgctccgggcggtcttctttttagtcctggggcttttgggtcattctcacggaggattccccaacaccatcagcataggtggacttttcatgagaaacacagtgcaggagcacagcgctttccgctttgccgtgcagttatacaacaccaaccagaacaccaccgagaagcccttccatttgaattaccacgtagatcacttggattcctccaatagtttttccgtgacaaatgctttctgctcccagttctcgagaggggtgtatgccatctttggattctatgaccagatgtcaatgaacaccctgacctccttctgtggggccctgcacacatcctttgttacgcctagcttccccactgacgcagatgtgcagtttgtcatccagatgcgcccagccttgaagggcgctattctgagtcttctgggtcattacaagtgggagaagtttgtgtacctctatgacacagaacgaggattttccatcctccaagcgattatggaagcagcagtgcaaaacaactggcaagtaacagcaaggtctgtgggaaacataaaggacgtccaagaattcaggcgcatcattgaagaaatggacaggaggcaggaaaagcgatacttgattgactgcgaagtcgaaaggattaacacaattttggaacaggttgtgatcctagggaaacactcaagaggttatcactacatgctcgctaacctgggttttactgatattttactggaaagagtcatgcatgggggagccaacattacaggtttccagattgtcaacaatgaaaaccctatggttcagcagttcatacagcgctgggtgaggctggatgaaagggaattccctgaagccaagaatgcaccactaaagtatacatctgcattgacacacgacgcaatactggtcatagcagaagctttccgctacctgaggaggcagcgagtagatgtgtcccggagaggaagtgctggagactgcttagcaaatcctgctgtgccctggagtcaaggaattgatattgagagagctctgaaaatggtgcaagtacaaggaatgactggaaatattcaatttgacacttatggacgtaggacaaattataccatcgatgtgtatgaaatgaaagtcagtggctctcgaaaagctggctactggaatgagtatgaaaggtttgtgcctttctcagatcagcaaatcagcaatgacagtgcatcctcagagaatcggaccatagtagtgactaccattctggaatcaccatatgtaatgtacaagaagaaccatgagcaactggaaggaaatgaacgatatgaaggctattgtgtagacctagcctatgaaatagccaaacatgtaaggatcaaatacaaattgtccatcgttggtgacgggaaatatggtgcaagggatccagagactaaaatatggaacggcatggttggggaacttgtctatgggagagctgatatagctgttgctccactcactataacattggtccgtgaagaagtcatagatttttcaaagccattcatgagcctgggcatctccatcatgataaagaagcctcagaaatcaaaaccaggcgtattctcatttctggatcccctggcttatgaaatctggatgtgcattgtctttgcttacattggagtcagcgtagttcttttcctagtcagcaggttcagtccttatgaatggcacttggaagacaacaatgaagaacctcgtgacccacaaagtcctcctgatcctccaaatgaatttggaatatttaacagtctttggttttccttgggtgcctttatgcagcaaggatgtgatatttctccaagatcactctccgggcgcattgttggaggggtttggtggttcttcaccctgatcataatttcttcctatactgccaatctcgctgctttcctgactgtggagaggatggtttctcccatagagagtgctgaagacttagctaaacagactgaaattgcatatgggaccctggactccggttcaacaaaagaatttttcagaagatccaaaattgctgtgtacgagaaaatgtggtcttacatgaaatcagcggagccatctgtgtttaccaaaacaacagcagacggagtggcccgagtgcgaaagtccaagggaaagttcgccttcctgctggagtcaaccatgaatgagtacattgagcagagaaaaccatgtgatacgatgaaagttggtggaaatctggattccaaaggctatggtgtggcaacccctaaaggctcagcattaggaaatgctgttaacctggcagtattaaaactgaatgagcaaggcctcttggacaaattgaaaaacaaatggtggtacgacaaaggagagtgcggcagcgggggcggtgactccaaggacaagaccagcgctctgagcctgagcaatgtggcaggcgttttctatatacttgtcggaggtctggggctggccatgatggtggctttgatagaattctgttacaaatcacgggcagagtccaaacgcatgaaactcacaaagaacacccaaaactttaagcctgctcctgccaccaacactcagaattatgctacatacagagaaggctacaacgtgtatggaacagagagtgttaagatctagggatcccttcccactggaggcatgtgatgagaggaaatcaccgaaaacgtggctgcttcaaggatcctgagccagatttcactctccttggtgtcgggcatgacacgaatattgctgatggtgcaatgacctttcaataggaaaaactgatttttttttccttcagtgccttatggaacactctgagactcgcgacaatgcaaaccatcattgaaatctttttgctttgcttgaaaaaaaataattaaaataaaaaccaacaaaaatggacatgcaagattccagtatgcgaaaaaaaatcttattaagtcaattcaacaaaagccattctttgataccactgcagagtatataaacaccatgttctttaatacacacacacacacacacacacacacacacacacatttaaattccaattcagcaaagaggcccatctaagctaaaaaaattaattcttcctgattaaaaagaaaaaatctgtctcccagtgtttgggaagacggactggcatttcttctaggatctgctgaccagatgtttttggtatttcctgttggtggtgatgttctgtgcactctatttcctttcaatgttgctgaaatgtgtatatctttagaatgtaaatgcaacacttaagaaaattcaaacactttggaaaagggactaaacagtgatttctctgtgttcttgaaatggttttgtgaaaatgctttgataacttcccactcaaagaagagatttacagagctttcgaaattgactttgtgtgtagcaagggacggggcactatcaggatacctcttggtgctttcctaaaatggatcccggggctttccaaggagcctggaatttcagctcacagatctgtttttcttgcttcagtgtgcattttaagtcaatagagctgagtatctagcattgaggtgagggaaatgctgcctatactcccagatgtgtttagaatatctcagaaacaacactgtgtttagctcggctttctctgctaagtatgcctttcaagtgtacaccacggagacaggaccgcgttgcaaggcgggacagcaggttcagaccacagttctcagtctgactttactcttgctaggtctgtcctactagctgttgcctgctaccgcccatggctctccatcggactgcatgtgtccttttctagtttgcaaagactaaaatgcattcccaaacctactgctaatctgagggcctcagcatcacttccagatccttgcttggagcagtctctctattgactctctcagatcgctccactgctccatgggctatcaagtaactaactgcatacctgccgttggcatcatcagaacagtccgaagaaatagtctccactcactaattacctcctatataacgacgtatgcttcctgtagttcagtagtttgctctcatcgataacgtgcattgggaagtttccagactgcaaaaactaggagctcgcattcatttcccaagtgtgacccttagatgcttagttgactcgctgcatatttgctcttgtcttcagaaaagaaaggaagaagtatcgttccaacgaaatgtttccagaaaagtgtactataaactttcattccaaaaatggtgtcataagcaaacaactcacttgtcaaatttcaaatggtattgaacaaaaaaagaaagctgttgtgtttttgttttgttttgttttcatgaaactgtgattttcaacttatgaatgctataatgtcccagcgcgggaagctcacgctgtgtgaacatgaagttgtataaaacaaaccaaccaacctacacacaaatgttttcataggcactgtataaagaaaaatgtatgtttattaactcaaatcagtttttcagagaggaaacgtcactgagatgaagaggcgggtaaattggtttgttattttttaaaaaaaacttgcatgtttaaaaaaaagttgattgcttcaaatttctgctactaacttcaagctatgggagtttggcagtagtcacttgaggattttttttccaattcttttctttttgttgttaaagctgtacttcagtgaacagaaaaattgccaagcaaactaatggctataaaagcgtaatttgcatgtgtgggcataaactacagagcctcattgccatgaggtattgtacaaagttttaatacattttgtaaataaaattgtaaagaaagaaaaaaaaaaaaaa

SEQ ID NO: 549 - DNA, 847 bp, Artificial Sequence
  ORM1
acagagtaaacttttgctgggctccaagtgaccgcccatagtttattataaaggtgactgcaccctgcagccaccagcactgcctggctccacgtgcctcctggtctcagtatggcgctgtcctgggttcttacagtcctgagcctcctacctctgctggaagcccagatcccattgtgtgccaacctagtaccggtgcccatcaccaacgccaccctggaccggatcactggcaagtggttttatatcgcatcggcctttcgaaacgaggagtacaataagtcggttcaggagatccaagcaaccttcttttacttcacccccaacaagacagaggacacgatctttctcagagagtaccagacccgacaggaccagtgcatctataacaccacctacctgaatgtccagcgggaaaatgggaccatctccagatacgtgggaggccaagagcatttcgctcacttgctgatcctcagggacaccaagacctacatgcttgcttttgacgtgaacgatgagaagaactgggggctgtctgtctatgctgacaagccagagacgaccaaggagcaactgggagagttctacgaagctctcgactgcttgcgcattcccaagtcagatgtcgtgtacaccgattggaaaaaggataagtgtgagccactggagaagcagcacgagaaggagaggaaacaggaggagggggaatcctagcaggacacagccttggatcaggacagagacttgggggccatcctgcccctccaacccgacatgtgtacctcagctttttccctcacttgcatcaataaagcttctgtgtttggaacagctaaaaaaaaaa

SEQ ID NO: 550 - DNA, 1516 bp, Artificial Sequence
  LYZ
aaatactggggccagctcaccctggtcagcctagcactctgacctagcagtcaacatgaaggctctcattgttctggggcttgtcctcctttctgttacggtccagggcaaggtctttgaaaggtgtgagttggccagaactctgaaaagattgggaatggatggctacaggggaatcagcctagcaaactggatgtgtttggccaaatgggagagtggttacaacacacgagctacaaactacaatgctggagacagaagcactgattatgggatatttcagatcaatagccgctactggtgtaatgatggcaaaaccccaggagcagttaatgcctgtcatttatcctgcagtgctttgctgcaagataacatcgctgatgctgtagcttgtgcaaagagggttgtccgtgatccacaaggcattagagcatgggtggcatggagaaatcgttgtcaaaacagagatgtccgtcagtatgttcaaggttgtggagtgtaactccagaattttccttcttcagctcattttgtctctctcacattaagggagtaggaattaagtgaaaggtcacactaccattatttccccttcaaacaaataatatttttacagaagcaggagcaaaatatggcctttcttctaagagatataatgttcactaatgtggttattttacattaagcctacaacatttttcagtttgcaaatagaactaatactggtgaaaatttacctaaaaccttggttatcaaatacatctccagtacattccgttctttttttttttgagacagtctcgctctgtcgcccaggctggagtgcagtggcgcaatctcggctcactgcaacctccacctcccgggttcacgccattctcctgcctcagcctcccgagtagctgggattacgggcgcccgccaccacgcccggctaattttttgtatttttagtagagacagggtttcaccgtgttagccaggatggtctcgatctcctgaccttgtgatccacccacctcggcctcccaaagtgctgggattacaggcgtgagccactgcgcccggccacattcagttcttatcaaagaaataacccagacttaatcttgaatgatacgattatgcccaatattaagtaaaaaatataagaaaaggttatcttaaatagatcttaggcaaaataccagctgatgaaggcatctgatgccttcatctgttcagtcatctccaaaaacagtaaaaataaccactttttgttgggcaatatgaaatttttaaaggagtagaataccaaatgatagaaacagactgcctgaattgagaattttgatttcttaaagtgtgtttctttctaaattgctgttccttaatttgattaatttaattcatgtattatgattaaatctgaggcagatgagcttacaagtattgaaataattactaattaatcacaaatgtgaagttatgcatgatgtaaaaaatacaaacattctaattaaaggctttgcaacac

SEQ ID NO: 551 - DNA, 2353 bp, Artificial Sequence
  SLC3A1
aagaccaagcattcagcaagccactcttccacctcccttactgcaggaaggcactccgaagacataagtcggtgagacatggctgaagataaaagcaagagagactccatcgagatgagtatgaagggatgccagacaaacaacgggtttgtccataatgaagacattctggagcagaccccggatccaggaagctcaacagacaacctgaagcacagcaccaggggcatccttggctcccaggagcccgacttcaagggcgtccagccctatgcggggatgcccaaggaggtgctgttccagttctctggccaggcccgctaccgcatacctcgggagatcctcttctggctcacagtggcttctgtgctggtgctcatcgcggccaccatagccatcattgccctctctccaaagtgcctagactggtggcaggaggggcccatgtaccagatctacccaaggtctttcaaggacagtaacaaggatgggaacggagatctgaaaggtattcaagataaactggactacatcacagctttaaatataaaaactgtttggattacttcattttataaatcgtcccttaaagatttcagatatggtgttgaagatttccgggaagttgatcccatttttggaacgatggaagattttgagaatctggttgcagccatacatgataaaggtttaaaattaatcatcgatttcataccaaaccacacgagtgataaacatatttggtttcaattgagtcggacacggacaggaaaatatactgattattatatctggcatgactgtacccatgaaaatggcaaaaccattccacccaacaactggttaagtgtgtatggaaactccagttggcactttgacgaagtgcgaaaccaatgttattttcatcagtttatgaaagagcaacctgatttaaatttccgcaatcctgatgttcaagaagaaataaaagaaattttacggttctggctcacaaagggtgttgatggttttagtttggatgctgttaaattcctcctagaagcaaagcacctgagagatgagatccaagtaaataagacccaaatcccggacacggtcacacaatactcggagctgtaccatgacttcaccaccacgcaggtgggaatgcacgacattgtccgcagcttccggcagaccatggaccaatacagcacggagcccggcagatacaggttcatggggactgaagcctatgcagagagtattgacaggaccgtgatgtactatggattgccatttatccaagaagctgattttcccttcaacaattacctcagcatgctagacactgtttctgggaacagcgtgtatgaggttatcacatcctggatggaaaacatgccagaaggaaaatggcctaactggatgattggtggaccagacagttcacggctgacttcgcgtttggggaatcagtatgtcaacgtgatgaacatgcttcttttcacactccctggaactcctataacttactatggagaagaaattggaatgggaaatattgtagccgcaaatctcaatgaaagctatgatattaatacccttcgctcaaagtcaccaatgcagtgggacaatagttcaaatgctggtttttctgaagctagtaacacctggttacctaccaattcagattaccacactgtgaatgttgatgtccaaaagactcagcccagatcggctttgaagttatatcaagatttaagtctacttcatgccaatgagctactcctcaacaggggctggttttgccatttgaggaatgacagccactatgttgtgtacacaagagagctggatggcatcgacagaatctttatcgtggttctgaattttggagaatcaacactgttaaatctacataatatgatttcgggccttcccgctaaaatgagaataaggttaagtaccaattctgccgacaaaggcagtaaagttgatacaagtggcatttttctggacaagggagagggactcatctttgaacacaacacgaagaatctccttcatcgccaaacagctttcagagatagatgctttgtttccaatcgagcatgctattccagtgtactgaacatactgtatacctcgtgttaggcacctttatgaagagatgaagacactggcatttcagtgggattgtaagcatttgtaatagcttcatgtacagcatgctgcttggtgaacaatcattaattcttcgatatttctgtagcttgaatgtaactgctttaagaaaggttctcaaatgttttgaaaaaaataaaatgtttaaaagtaaaaaaaaaaaaaaaaaaaaaaaaaaaaaaaaaaa

SEQ ID NO: 552 - DNA, 2108 bp, Artificial Sequence
  CD36
ctttcaattcctctggcaacaaaccacacactgggatctgacactgtagagtgctttctcttctctttttttgggggggggagggggtgtggttgcatatttaaactctcacgcatttatgtactgaggactgcagtgtaggactttcctgcagaataccatttgatcctattaagaattgtccaaatgttggagcatttgattgaaaaatccttcttagccattttaaagatagctttccaatgattagacgaattgattctttctgtgactcatcagttcatttcctgtaaaattcatgtcttgctgttgatttgtgaataagaaccagagcttgtagaaaccactttaatcatatccaggagtttgcaagaaacaggtgcttaacactaattcacctcctgaacaagaaaaatgggctgtgaccggaactgtgggctcatcgctggggctgtcattggtgctgtcctggctgtgtttggaggtattctaatgccagttggagacctgcttatccagaagacaattaaaaagcaagttgtcctcgaagaaggtacaattgcttttaaaaattgggttaaaacaggcacagaagtttacagacagttttggatctttgatgtgcaaaatccacaggaagtgatgatgaacagcagcaacattcaagttaagcaaagaggtccttatacgtacagagttcgttttctagccaaggaaaatgtaacccaggacgctgaggacaacacagtctctttcctgcagcccaatggtgccatcttcgaaccttcactatcagttggaacagaggctgacaacttcacagttctcaatctggctgtggcagctgcatcccatatctatcaaaatcaatttgttcaaatgatcctcaattcacttattaacaagtcaaaatcttctatgttccaagtcagaactttgagagaactgttatggggctatagggatccatttttgagtttggttccgtaccctgttactaccacagttggtctgttttatccttacaacaatactgcagatggagtttataaagttttcaatggaaaagataacataagtaaagttgccataatcgacacatataaaggtaaaaggaatctgtcctattgggaaagtcactgcgacatgattaatggtacagatgcagcctcatttccaccttttgttgagaaaagccaggtattgcagttcttttcttctgatatttgcaggtcaatctatgctgtatttgaatccgacgttaatctgaaaggaatccctgtgtatagatttgttcttccatccaaggcctttgcctctccagttgaaaacccagacaactattgtttctgcacagaaaaaattatctcaaaaaattgtacatcatatggtgtgctagacatcagcaaatgcaaagaagggagacctgtgtacatttcacttcctcattttctgtatgcaagtcctgatgtttcagaacctattgatggattaaacccaaatgaagaagaacataggacatacttggatattgaacctataactggattcactttacaatttgcaaaacggctgcaggtcaacctattggtcaagccatcagaaaaaattcaagtattaaagaatctgaagaggaactatattgtgcctattctttggcttaatgagactgggaccattggtgatgagaaggcaaacatgttcagaagtcaagtaactggaaaaataaacctccttggcctgatagaaatgatcttactcagtgttggtgtggtgatgtttgttgcttttatgatttcatattgtgcatgcagatcgaaaacaataaaataagtaagtatgtaccaaaaaatattgcttcaataatattagcttatatattacttgttttcactttatcaaagagaagttacatattaggccatatatatttctagacatgtctagccactgatcatttttaaatataggtaaataaacctataaatattatcacgcagatcactaaagtatatctttaattctgggagaaatgagataaaagatgtacttgtgaccattgtaacaatagcacaaataaagcacttgtgccaaagttgtccaaaaaa

SEQ ID NO: 553 - DNA, 5586 bp, Artificial Sequence
  ABAT
tcttgtgatcaccctcattacctcttctgggccccctgtggacctgcgttgacccagcatgggctacaatgggggagttgggtaatcgctcccggtaggttcctccccaacccccgaggcggggtcaggtggagcgtgggcgccagagcagcccctctgccttgggtgtcttggagatgacttggcgccccccggagccccgtcatggctgtggctgcgtccacaacactgcatcagcagagtcctggggaagccatttaggaatctgaagcccgggatttctgctttgtcccttcaggggttcctgagcctgttaaaaaaaaaaaaaaatctaggaagaggccctggaaggaaaaaggggagggagatagcctattttacaaggtctgaaatgatgtgtcttatccttctggcttaaaccaagctgggcttaaaacatcttttaaaaaaaatctgtattctatttttttctctctgtttatcgctctccttctgcctctgttaatctttgtttctgtgtagttgcatcctgtttctgtctgaaaacccttgtctttctgaatccatctttcagtctctcacattctgtctttcccctcctccttcaccttccctccgtccctctcccttgcgcacttgccgggtaccagctgagtgcatccttttcccaaacctgctctgcttccaaggggcccttttctgtctcctccacctgtccccatgttttggggactgcctggaaatccgggacaccctcctgaggagggagctggtgcccaacggcacctcttaggatgaacccagccagctgcgttcctggcctctgcagaatggcatacagaaggcattttaagcaagcgagctgagctcgccgcaggactccgactaccaggcaccggtggcagcacgcaaagggtgtccctgtccctcaaggggtcatggcctccatgttgctcgcccagcgcctggcctgcagcttccagcacagctaccgcctgctggtgcctggatccagacacattagtcaagctgcagccaaagtcgacgttgaatttgattatgatgggcctctgatgaagacggaagtcccagggcctagatctcaggagttaatgaaacagctgaatataattcagaatgcagaggctgtgcattttttctgcaattacgaagagagccgaggcaattacctggttgatgtggacggcaaccgaatgctggatctttattcccagatctcctctgtccccataggttacagccaccccgccctgctgaaactcatccaacagcctcaaaatgcgagcatgtttgtcaacagacccgccctcggaatcctgcctccggagaactttgtggagaagctccggcagtccttgctctcggtggctcccaaagggatgtcccagctcatcaccatggcctgcggctcctgctccaatgaaaacgccttaaagaccatcttcatgtggtaccggagcaaggaaagagggcagaggggcttctcccaggaggagctggagacgtgcatgattaaccaggcccctggctgccccgactacagcatcctctccttcatgggcgcgttccatgggaggaccatgggttgcttagcgaccacgcactctaaagccattcacaagatcgacatcccttcctttgactggcccatcgcaccgttcccacggctgaaataccctctggaagagtttgtgaaagagaaccaacaggaggaggcccgctgtctggaagaggtggaggatctgattgtgaaatatcggaaaaagaagaagacggtggccgggatcatcgtggagcccatccagtccgagggtggagacaaccacgcatccgatgacttctttcggaagctgagagacatcgccaggaagcatggctgcgccttcttggtggacgaggtccagaccggaggaggctgcacgggcaagttctgggcccatgagcactggggcctggatgacccagcagacgtgatgaccttcagcaagaagatgatgactgggggcttcttccacaaggaggagttcaggcctaatgctccctaccggatcttcaacacctggctgggggacccgtccaagaacctgttgctggctgaggtcatcaacatcatcaagcgggaggacctgctaaataatgcagcccatgccgggaaggccctgctcacaggactgctggacctccaggcccggtacccccagttcatcagcagggtgagaggacgaggcaccttttgctccttcgatactcccgatgattccatacggaataagctcattttaattgccagaaacaaaggtgtggtgttgggtggctgtggtgacaaatccattcgtttccgtcccacgctggtcttcagggatcaccacgctcacctgttcctcaatattttcagtgacatcttagcagacttcaagtaaagaagccatttccactacagtgagaaagcccggatcccaacagttgtcaaattgattagtttgcctaattcatgttttcacttaaaagtatcagaggtgaatgcacagtgaagggtgatttgtggggagggagcatttttggtggtcttgggggaggggaggggagggaagggctggtgttgattttcctccctgcagagccaatggtgcacattggtttaagcccagagatcctgcttgagccctggactcatcttgggaagggccatgggaggtcctggctagagttctgcccaaccttgaccaaccccagcaatttttccaaaagccagtcaagggcattacatttgttcctgggactggcagctgggcctcctgggtgccagtccatctcaagtgccatattctgtgatcacggatgttggctccccctcgccctatgcaagcaaacacactctcacctcctctcccagcctcccggagctctgagcacgccccacgcatggtgcaggagggactggacagatctgaggaaggccgtaaaatggggacaggaggattcagctcaggagtaagggaagaggtcctctggccccctgaagatgagaatcacccctctcagtgcacctggggatccccctaaactgtgaattctgccctggacagggctttgcccttggaggatccccaggtggccttacccgtgattcttactcggcatcctccattccccaaactccctcctccctgttaaatgtcaacctagacctggacctgggtgggaggaaactgtagcctgagtgtccacagggacacacgtgagccacagggctagaagcacaggcccgtcaccccaggaggaaaagcccagggtctggggcagcagagccatcgcatcatgtttcccagggcaacttgaggtctgacttttggctccctcgccctaagaggctcttcctctcttttgctcatccaccttcacaccacttgtgagctgacccccaggaacagcttggctgttccaccagagcagagggaatcattgctggactggatttcttctggagggaagcaccatgaattaaaggtgccagagctccatgcatggaaaagtggcctgttggttcaacgtggtttccttgtacttgatcctcctgaaatgagagattttcctgagatgactgagtatggagattaccaggcagatgataccgaaatgcttaaaggggctgtggctgaggctgtagcatctctgctggaggtgagacactctgggaactgatttgacctcgaatgctcctaaaagagaacttgatagcctgacagcagagaagtattatttggtggggagtctgagaaagcctggcttgtattatctgtccaaaaggaagcctcttcatctcccggtgccttggttgactattttggaaataggcatatcaaggttcctgattcagcactttgctcttttaataacaaatcgtccaaagatctcaaagtaagggtttttttttttagcttccactcttccgcagacttggtcatcgacctatttttgttgaagaatgaaaggcaatgacaagtttaacatatacaaattcgtgaattcttgttcattttgcattcctgcagtcagtgctaatccgtcgttcttaatcaggagttctgccaggtttaaggtcacctgcactcccagccaagtggtgatgtatgcctcccactctctgcaaggttttcctcatttttatattcatttattcatcattcattcattcacctaactttcattaaatagctgcaccatcccaggccctgtgcggagcatcgggaatacaaagatgagataaaacattgtccctgcccccgggggctcacatgccactggaaacaacagactcttaaactaacaattcaagcaggcgccaagtgctatgacagaggtgtgaataaaagcatcaggaaatcggatggagaaccaccattcacccaagggtcagaggaggtttcaaagaaaaggtgtcattggagcagtgttttgcagaatgagccagagttcaccaagcaggcaaggcaaggaagggtgttgcagagagggaacagcatatgcaaaggcgtatcagttcatggcatcacatctttcactggggaagccagtttccacaggcagcatcccaaggttcaataaggccttatttaacaagcaagcaaaatgcaaaccaaaccattattcatttattggcttaagtatgctttctcctgaaaactttagcattgggtgcaaatattcagtatggttctcggagtccaaagggttttaagccagggcacaaccagaaaagtggctctctttggtagggagaggggctccaatatttcgttctctccccatggggcactgacagagaaatgaaatagttttatctggaaaattccagagctattatttactccttaccaagggaagttacttcttgtaaaaacttttaagccatttatcaacaagttcttgttgactcagggcataatgagttcctgagacatgctcttttgggggctggggctttagctagaagaatttcaaggaaaagaattctcagcagagctcaagattgtagaaactcagcagaagctggtaaaaacatggggagcccggaggacaggctgctgtccagggcagaggccatgaagaagtgcttccgtggccgacagtctggaaatgaatccatcatacattagtgccatagagtttagtaaccgtccagcaagtgtcatcacttttacagaaaacaaggtccagtaatagcaagtcttagtacatcctcacttttattataaatgggtgttttttcataatttttactgacgctcagtaaccatgcaaaattgtgtatagcattaatgtatctacatacctacacctatctatatataagctcatggtagaaaaccatagctaagtagcatcgcagacttaagcgtacaaagtgatcttgttcacaagtaatctgttgacagtgccaataaatgataaaaaaaaaattaacatgtcacaatgtaacggatgaccatatgcacaattccatgaattaaatctgtttcctgtgttagtcagtattcttaaataaaatttataattgaaacatga

SEQ ID NO: 554 - DNA, 4376 bp, Artificial Sequence
  GABRA1
aacagaagatgccggagaaggggggggaaaagtagatgcggatttcgtcctgacttctaaaaattcctcctctccctctcccattttcctaatccgagaatgatggagctcgaggcaaaggaatgattccggaaatggagatatgattctcaaacctagaaatgatcggagtgatttattagttaaatattcttcgtccaggaacccagcacaattcagagctgcagattggatattgggaagcaaatttgggtgtgaaatcttcagcaaaggagcacgcagagtccatgatggctcagaccaagtgagtgagaggcagagcgaggacgcccctctgctctggcgcgcccggactcggactcgcagactcgcgctggctccagtctctccacgattctctctcccagacttttccccggtcttaagagatcctgtgtccagagggggccttagctgctccagcccgcgatgaggaaaagtccaggtctgtctgactgtctttgggcctggatcctccttctgagcacactgactggaagaagctatggacagccgtcattacaagatgaacttaaagacaataccactgtcttcaccaggattttggacagactcctagatggttatgacaatcgcctgagaccaggattgggagagcgtgtaaccgaagtgaagactgatatcttcgtcaccagtttcggacccgtttcagaccatgatatggaatatacaatagatgtatttttccgtcaaagctggaaggatgaaaggttaaaatttaaaggacctatgacagtcctccggttaaataacctaatggcaagtaaaatctggactccggacacatttttccacaatggaaagaagtcagtggcccacaacatgaccatgcccaacaaactcctgcggatcacagaggatggcaccttgctgtacaccatgaggctgacagtgagagctgaatgtccgatgcatttggaggacttccctatggatgcccatgcttgcccactaaaatttggaagttatgcttatacaagagcagaagttgtttatgaatggaccagagagccagcacgctcagtggttgtagcagaagatggatcacgtctaaaccagtatgaccttcttggacaaacagtagactctggaattgtccagtcaagtacaggagaatatgttgttatgaccactcatttccacttgaagagaaagattggctactttgttattcaaacatacctgccatgcataatgacagtgattctctcacaagtctccttctggctcaacagagagtctgtaccagcaagaactgtctttggagtaacaactgtgctcaccatgacaacattgagcatcagtgccagaaactccctccctaaggtggcttatgcaacagctatggattggtttattgccgtgtgctatgcctttgtgttctcagctctgattgagtttgccacagtaaactatttcactaagagaggttatgcatgggatggcaaaagtgtggttccagaaaagccaaagaaagtaaaggatcctcttattaagaaaaacaacacttacgctccaacagcaaccagctacacccctaatttggccaggggcgacccgggcttagccaccattgctaaaagtgcaaccatagaacctaaagaggtcaagcccgaaacaaaaccaccagaacccaagaaaacctttaacagtgtcagcaaaattgaccgactgtcaagaatagccttcccgctgctatttggaatctttaacttagtctactgggctacgtatttaaacagagagcctcagctaaaagcccccacaccacatcaatagatcttttactcacattctgttgttcagtcctctgcactgggaatttatttatgttctcaacgcagtaattcccatctgctttattgcctctgtcttaaagaatttgaaagtttccttattttcataattcatttaagaacaagagacccctgtctggcagtctggagcaaagcagactatgcagcttggagacaggattctgacagagcaagcgaaagagcaaagtcatgtcagaaggagacagaatgagagagaaaagagggggaagatggttcaaagatacaagaaaaagtagaaaaaaaaataacacttaactaaaacccctaggtcatttgtagatatatatttccaaatattctaaaaaagatactgtatatgtcaaaaatatttttatgtgaaggtgtttcaaagggtaaattataaatgtttcatgaagaaaaaattttaaaaatctacgtctttattacacaaactatggtgtgcttatgtttttgttttgctttttaaactgatgtatagctttaacattttgtttccaaagctgaagatccccattctttctctttgaaaaaaaaaaaggcctaatgcattattttgtcataaaatgctattttaaaattcatggaactttcatacgtaaaggtgcagttgctcattgtagagcacatttagtccaatgaagataaatgctttaaatagtttacttcactttcatctgagcttttaccactagactcaaggaagaataattttaacagacatgtatactccatagaaactaaactaaaatagtttaaaaatattccctttttcaccctattttcagatagcacatgagcccaacactcacttaattctcattatgaagatgtttttagaggggcaaaaatattttgcaagctctggaattgttgaatgtattcttttatataactacattaaaagctttagattgaaatttatgactagcaaacaaaaatagaatatataaacgatatatgtaaatatacagcatgagattgtacattttttacttttttaaaattgtgttcttaaaatattgtgtaagaatcactgcacttagctgttggaatgttgttaaatgctatggaaatacatttagaacctgcatttaagaacagaacagcaagtatgaaccacatggaacttaaaacatatgggtgtgaagtccacttatgtagacaaaacttataatttccaaactgttgtctagtatacagtgatcagttgctctctgttcaagtcattccacacatttccctattttaggctattataatatagaaagaaaatgggaagcattagttggagctagaaaatgaactgtatattattgctatatttgctaataccaactatttcaataagtgttgtaccatatgtagcattaaatataaaatacataaaagaatgtacagaaaatagcttttattgagtaatattacatttcatttatactgtagcaatatatttgtaggtatactatgtaagggctttaaataaaagaggtccattaatacttccttataaaaattctagtctgtttcattactgcccagatgttttagagataaatatttatgcagaaggtatttttgaagtctccttttgtctgatagagtttaacagatatttaaatttagtgctcagaatccacaagtcacggtctaaacacacttagaatactacagcataaatctgttagcattattgccaaataagacagttgggatccaaacccaagtcttgagcaatgtttttctcaaaaagctgctatccaatgatataggaaaatacattgtgttttcctaaacacacttttctttttaaatgtgcttcattgtttgatttggtcctgcctaaatttcacaagctaggccaatgaaggctgaatcaaagacatttcatccaccaatatcatgtgtagatattatgtatagaaaataaaataaattatggctctaacttctgtgttgctgtttatcttgttatttttcggcgttatactaatgtgtttattgagagcattttaccttccagacttctcatggctaacttttggtctgtattttgctccttagatgtgaatatttcttattagtctgcttcctgctacgcaatgactgcatttctatcatttctcagtttgttagtatatgtggatagtattctactgtataaatgattgcaaagtttatcaaaaacaaattattatatgtagcttttctacagtgctttgctaaaccatgtagtactagttaagtcttccttgaaaataaagatacactcttataggggacagttcctgttcactcccaggaaacttttttaaaagatgacactgaatgtttattgcactttagtgcagtgaagtggcaataaaacctaacatgaatcaaggttgtttatggcagatgcatgtgttgctttacagagtttagcaaaagctcttaattttatgtcatactgtattctactgaataataaagctaacattattcaataataaaatggaa

SEQ ID NO: 555 - DNA, 3933 bp, Artificial Sequence
  GABRG2
gtaagtgtgaggggcatgagtatacacgagtgtgcgtgtctttccctctcccttatttgtctccgtatgagtctctccttgtaccctccccctgcctcgatgatattactcccccagacttggaagccgctgccagagtgacgctttgatggtatctgcaagcgtttttgctgatcttatctctgccccctgaatattaattccctaatctggtagcaatccatctccccagtgaaggacctactagaggcaggtggggggagccaccatcagatcataagcataagaataatacaaaggggagggattcttctgcaaccaagaggcaagaggcgagagaaggaaaaaaaaaaaagcgatgagttcgccaaatatatggagcacaggaagctcagtctactcgactcctgtattttcacagaaaatgacggtgtggattctgctcctgctgtcgctctaccctggcttcactagccagaaatctgatgatgactatgaagattatgcttctaacaaaacatgggtcttgactccaaaagttcctgagggtgatgtcactgtcatcttaaacaacctgctggaaggatatgacaataaacttcggcctgatataggagtgaagccaacgttaattcacacagacatgtatgtgaatagcattggtccagtgaacgctatcaatatggaatacactattgatatattttttgcgcaaacgtggtatgacagacgtttgaaatttaacagcaccattaaagtcctccgattgaacagcaacatggtggggaaaatctggattccagacactttcttcagaaattccaaaaaagctgatgcacactggatcaccacccccaacaggatgctgagaatttggaatgatggtcgagtgctctacaccctaaggttgacaattgatgctgagtgccaattacaattgcacaactttccaatggatgaacactcctgccccttggagttctccagttatggctatccacgtgaagaaattgtttatcaatggaagcgaagttctgttgaagtgggcgacacaagatcctggaggctttatcaattctcatttgttggtctaagaaataccaccgaagtagtgaagacaacttccggagattatgtggtcatgtctgtctactttgatctgagcagaagaatgggatactttaccatccagacctatatcccctgcacactcattgtcgtcctatcctgggtgtctttctggatcaataaggatgctgttccagccagaacatctttaggtatcaccactgtcctgacaatgaccaccctcagcaccattgcccggaaatcgctccccaaggtctcctatgtcacagcgatggatctctttgtatctgtttgtttcatctttgtcttctctgctctggtggagtatggcaccttgcattattttgtcagcaaccggaaaccaagcaaggacaaagataaaaagaagaaaaaccctgcccctaccattgatatccgcccaagatcagcaaccattcaaatgaataatgctacacaccttcaagagagagatgaagagtacggctatgagtgtctggacggcaaggactgtgccagttttttctgctgttttgaagattgtcgaacaggagcttggagacatgggaggatacatatccgcattgccaaaatggactcctatgctcggatcttcttccccactgccttctgcctgtttaatctggtctattgggtctcctacctctacctgtgaggaggtatgggttttactgatatggttcttattcactgagtctcatggagagatgtctgttctaagtccacttaaataatcctctatgtggttgataatgatctgaatctgtttctatgtccaaacctggtaaattttataatgtcatattgtttgtgcccagccctcctttggttagtgtactttgaacttcgatgtttgctgtgtttcaaacctgcaaggcaaagtaaaattagagcaagaacattcaaaccaaataagatatttttcagctacagcaaataaaacagtgaaagccctgactatttacagtagtggtatccttactagattcataatgcaattagatagaaaaggtccaaaactgtaccctatgttcactccgggtcaagttgtgataaatttgatcccaatagaatacctccctcatttaagaaaaatcataactcactttaaatatgaaagcctagtccagaaatctattacacctttatctcaagataggaagaaaatttcctccacattcatgtacaatgatgtaaatatttcaataacttagaatgcttcaagtttagtgcatgcatctctttagatccaaaataaatggactgaagttatcatcctattgtcttttattttgtgtccttgggctataaaagattcctgaatgtaattataaggatttgggtttggaaatggagggaggaattttcattgccttctccctcatgcatgaagattcgaacagcttattttttccttgtatgacatattacaacactttaagtaaaatatagactggataatcaacatttgccacctctaaatatgcccaatttcataactagagtataaagtaattgtatgtgcttgccgctatttttttcttccttttaggatgatagatcataacagaacttattctccatctcaagatctgcttctagtgattgtgagtgccttgtgggcagaatccttgtcatttcctctttgggtctgtagcaccttgcatagtgcctggcatatagttggtgctcaataaatatggtttgaagtgaattgccctcacatgcttctggcaaatctctgtgctggcctgaaaccagtgactcatcttctcacataggtgttgtcaagtgatatttgattttgtaaaaataaccagtaggatccaaagaactttagctatttatgttcatcttcaaaaaattattttaggcaaagtccatactccttttaaaacaatatttatgtcctatgtttgtgtatagacatgactctactagggcataattagagtttgtgtattatttttccaggtttggggatgagtcagtccttgcccatccacaattttgtttgtgaacttataacaggaataagcaaaattcatacctgactagtgttcagaatgtagcattctgtgcgaaaaagtattgaagattagcttttaaaaactgaaaaaaaaaaatgaatgactcacatagaggttgagccaatgactgtggcctcattagattacattgtagttaaacaaagcaatttctccagacttaaaacatgatgagttgagctctatcttcatgtactcatcctgaatccttatttttctaaaatagcaccctttgttaattatttttatggaaattattactctgtcataattaaatcatagctagtataactttacagataacctaaaaagaatagaaaagaagagagagtggctttgtcagtataaaaccatgtaaagtcatcatcaagtcatctggatgaatcttgaaacacatttagctgccagttttacaaacctttaatatatcagtgctccagtatataacctcaaacaaatgtaaatagaacgaattattttcttgttttgaattgtcaatatattaaatgttgactctttgggagagttgttggcaagtttcaatggtgagaaacattattgtcaacttgaaatgtgttctgtaatggggacactacaaaaagctagctttccaatgtgtgcatagtattggcaatatgaatatatattatatataatctaatacttattataagctgctccctgtctatgtatttggaaaccttttcacaaagggaattgcctaacatgtggacttttacaataaaaatgctgcattctaatccatggtggcatctca

SEQ ID NO: 556 - DNA, 3220 bp, Artificial Sequence
  SERPINA1
acaatgactcctttcggtaagtgcagtggaagctgtacactgcccaggcaaagcgtccgggcagcgtaggcgggcgactcagatcccagccagtggacttagcccctgtttgctcctccgataactggggtgaccttggttaatattcaccagcagcctcccccgttgcccctctggatccactgcttaaatacggacgaggacagggccctgtctcctcagcttcaggcaccaccactgacctgggacagtgaatcgacaatgccgtcttctgtctcgtggggcatcctcctgctggcaggcctgtgctgcctggtccctgtctccctggctgaggatccccagggagatgctgcccagaagacagatacatcccaccatgatcaggatcacccaaccttcaacaagatcacccccaacctggctgagttcgccttcagcctataccgccagctggcacaccagtccaacagcaccaatatcttcttctccccagtgagcatcgctacagcctttgcaatgctctccctggggaccaaggctgacactcacgatgaaatcctggagggcctgaatttcaacctcacggagattccggaggctcagatccatgaaggcttccaggaactcctccgtaccctcaaccagccagacagccagctccagctgaccaccggcaatggcctgttcctcagcgagggcctgaagctagtggataagtttttggaggatgttaaaaagttgtaccactcagaagccttcactgtcaacttcggggacaccgaagaggccaagaaacagatcaacgattacgtggagaagggtactcaagggaaaattgtggatttggtcaaggagcttgacagagacacagtttttgctctggtgaattacatcttctttaaaggcaaatgggagagaccctttgaagtcaaggacaccgaggaagaggacttccacgtggaccaggtgaccaccgtgaaggtgcctatgatgaagcgtttaggcatgtttaacatccagcactgtaagaagctgtccagctgggtgctgctgatgaaatacctgggcaatgccaccgccatcttcttcctgcctgatgaggggaaactacagcacctggaaaatgaactcacccacgatatcatcaccaagttcctggaaaatgaagacagaaggtctgccagcttacatttacccaaactgtccattactggaacctatgatctgaagagcgtcctgggtcaactgggcatcactaaggtcttcagcaatggggctgacctctccggggtcacagaggaggcacccctgaagctctccaaggccgtgcataaggctgtgctgaccatcgacgagaaagggactgaagctgctggggccatgtttttagaggccatacccatgtctatcccccccgaggtcaagttcaacaaaccctttgtcttcttaatgattgaacaaaataccaagtctcccctcttcatgggaaaagtggtgaatcccacccaaaaataactgcctctcgctcctcaacccctcccctccatccctggccccctccctggatgacattaaagaagggttgagctggtccctgcctgcatgtgactgtaaatccctcccatgttttctctgagtctccctttgcctgctgaggctgtatgtgggctccaggtaacagtgctgtcttcgggccccctgaactgtgttcatggagcatctggctgggtaggcacatgctgggcttgaatccaggggggactgaatcctcagcttacggacctgggcccatctgtttctggagggctccagtcttccttgtcctgtcttggagtccccaagaaggaatcacaggggaggaaccagataccagccatgaccccaggctccaccaagcatcttcatgtccccctgctcatcccccactcccccccacccagagttgctcatcctgccagggctggctgtgcccaccccaaggctgccctcctgggggccccagaactgcctgatcgtgccgtggcccagttttgtggcatctgcagcaacacaagagagaggacaatgtcctcctcttgacccgctgtcacctaaccagactcgggccctgcacctctcaggcacttctggaaaatgactgaggcagattcttcctgaagcccattctccatggggcaacaaggacacctattctgtccttgtccttccatcgctgccccagaaagcctcacatatctccgtttagaatcaggtcccttctccccagatgaagaggagggtctctgctttgttttctctatctcctcctcagacttgaccaggcccagcaggccccagaagaccattaccctatatcccttctcctccctagtcacatggccataggcctgctgatggctcaggaaggccattgcaaggactcctcagctatgggagaggaagcacatcacccattgacccccgcaacccctccctttcctcctctgagtcccgactggggccacatgcagcctgacttctttgtgcctgttgctgtccctgcagtcttcagagggccaccgcagctccagtgccacggcaggaggctgttcctgaatagcccctgtggtaagggccaggagagtccttccatcctccaaggccctgctaaaggacacagcagccaggaagtcccctgggcccctagctgaaggacagcctgctccctccgtctctaccaggaatggccttgtcctatggaaggcactgccccatcccaaactaatctaggaatcactgtctaaccactcactgtcatgaatgtgtacttaaaggatgaggttgagtcataccaaatagtgatttcgatagttcaaaatggtgaaattagcaattctacatgattcagtctaatcaatggataccgactgtttcccacacaagtctcctgttctcttaagcttactcactgacagcctttcactctccacaaatacattaaagatatggccatcaccaagccccctaggatgacaccagacctgagagtctgaagacctggatccaagttctgacttttccccctgacagctgtgtgaccttcgtgaagtcgccaaacctctctgagccccagtcattgctagtaagacctgcctttgagttggtatgatgttcaagttagataacaaaatgtttatacccattagaacagagaataaatagaactacatttcttgca

SEQ ID NO: 557 - DNA, 855 bp, Artificial Sequence
  MYL2
gttcctgggctgcagagagctgggcggagtgtggaattcttctcgggaggcagtgctgggtcctttccaccatggcacctaagaaagcaaagaagagagccgggggcgccaactccaacgtgttctccatgttcgaacagacccaaatccaggaatttaaggaggccttcactatcatggaccagaacagggatggcttcattgacaagaacgatctgagagacacctttgctgcccttgggcgagtgaacgtgaaaaatgaagaaattgatgaaatgatcaaggaggctccgggtccaattaactttactgtgttcctcacaatgtttggggagaaacttaagggagcggaccctgaggaaaccattctcaacgcattcaaagtgtttgaccctgaaggcaaaggggtgctgaaggctgattacgttcgggaaatgctgaccacgcaggcggagaggttttccaaggaggaggttgaccagatgttcgccgccttcccccctgacgtgactggcaacttggactacaagaacctggtgcacatcatcacccacggagaagagaaggactaggagggggctcgctgctgcgccctgggctcgtctttgcagagtggtccctgccctcatctctctcccccgagtaccgcctctgtccctaccttgtctgttagccatgtggctgccccatttatccacctccatcttctttgcagcctgggtggctatgggtacttcgtggccgcacatcctacagttggaaatccatccagaggccatgttccaataaacaggaggtcgtgtatttggtcacgacatttctctgacaaaaaaaaaaaaaaaaaaaaaaaaaaaa

SEQ ID NO: 558 - DNA, 2226 bp, Artificial Sequence
  GABRB1
agccttagccagatcactgagcgcccagtaaaaaaaacaaaatcaggttgagggcagaaatgaaatcaacatagcaacctccaatgcatgaaggaaactccgtttacacatgctcgtaggatcccctgcgtggaaacagcagcttgtctctgactacccggaggacatggagcaccccaaataggaactttagagggattgaaatctgttgcctgttccactaggaatattgtttgcaaggcacaaggtgtcttttggtagtgagcgcgctctgcgcatgcgcaggtccattcgggaattactgcccagcagccgactaagttgcattccttgaatcttcgcagaaaagacaattcttttaatcagagttagtaatgtggacagtacaaaatcgagagagtctggggcttctctctttccctgtgatgattaccatggtctgttgtgcacacagcaccaatgaacccagcaacatgtcatacgtgaaagagacagtggacagattgctcaaaggatatgacattcgcttgcggccggacttcggagggccccccgtcgacgttgggatgcggatcgatgtcgccagcatagacatggtctccgaagtgaatatggattatacactcaccatgtatttccagcagtcttggaaagacaaaaggctttcttattctggaatcccactgaacctcaccctagacaatagggtagctgaccaactctgggtaccagacacctactttctgaatgacaagaaatcatttgtgcatggggtcacagtgaaaaatcgaatgattcgactgcatcctgatggaacagttctctatggactccgaatcacaaccacagctgcatgtatgatggatcttcgaagatatccactggatgagcagaactgcaccctggagatcgaaagttatggctataccactgatgacattgaattttactggaatggaggagaaggggcagtcactggtgttaataaaatcgaacttcctcaattttcaattgttgactacaagatggtgtctaagaaggtggagttcacaacaggagcgtatccacgactgtcactaagttttcgtctaaagagaaacattggttacttcattttgcaaacctacatgccttctacactgattacaattctgtcctgggtgtctttttggatcaactatgatgcatctgcagccagagtcgcactaggaatcacgacagtgcttacaatgacaaccatcagcacccacctcagggagaccctgccaaagatcccttatgtcaaagcgattgatatttatctgatgggttgctttgtgtttgtgttcctggctctgctggagtatgcctttgtaaattacatcttctttgggaaaggccctcagaaaaagggagctagcaaacaagaccagagtgccaatgagaagaataaactggagatgaataaagtccaggtcgacgcccacggtaacattctcctcagcaccctggaaatccggaatgagacgagtggctcggaagtgctcacgagcgtgagcgaccccaaggccaccatgtactcctatgacagcgccagcatccagtaccgcaagcccctgagcagccgcgaggcctacgggcgcgccctggaccggcacggggtacccagcaaggggcgcatccgcaggcgtgcctcccagctcaaagtcaagatccccgacttgactgatgtgaattccatagacaagtggtcccgaatgtttttccccatcaccttttctctttttaatgtcgtctattggctttactatgtacactgaggtctgttctaatggttccatttagactactttcctcttctattgttttttaaccttacaggtccccaacagcgatactgctgtttctcgaggtaagagattcagccatccaattggttttaggtcttgcatatcagttttattactgcaccatgtttacttcaaaaagacaaaacaaaaaaaaaattatttttccagtctaccgtggtccaggttatcagctctttaagagctctattaattgccatgtttacaaacaaacacaaagagagaagttagacaggtagatctttagcagtcttttctagtttccctggatttcactgatttattttttagggaaaatgaaaagaggaccttgctgtccgcctgcactgcttcctggtaaactataacaaacttatgctgccaaaaaaaaaaaaaaaaa

SEQ ID NO: 559 - DNA, 2843 bp, Artificial Sequence
  TECRL
ataccatttgacctttcaaaggttctccagcagtatttaactgatgcaaaaggaacacacttgcaattttctacttttgacatgacagaccctcctcttagttcacacaatgttcaaaaggcacaagtccctcgcttcggaacgcaagagagcattactttcccaaagagctacacggttcatactgaaggatgatatgagaaattttcactttttgtcaaaacttgtactctcagcgggccctctaagaccaactccagcagtcaaacattcaaaaacgactcactttgagattgaaatatttgatgctcaaacaaggaaacagatatgtattctggataaggtgacacaatcatctactattcatgatgttaagcaaaagtttcacaaagcatgtccaaagtggtacccttctcgagttggtctgcagctagaatgtggcgggccttttttgaaggactacattaccattcaaagtattgcagcttcctccattgtcacactgtatgctacagacctaggtcaacaagtcagttggaccacagtgtttttggctgaatacacaggacctctgctaatatacctcctcttttatttgaggatcccatgtatatatgatggaaaagagagtgctagaagattacgccacccagtggtacacttggcttgcttctgtcattgtatacactacatccgataccttttggaaaccttatttgttcacaaagtttctgcaggacacacacctttgaaaaatttgataatgagttgtgccttttactggggatttacttcttggattgcctactacattaatcatccactatatacaccaccatcatttggaaacaggcaaatcacagtatctgctatcaattttctgatttgtgaagctgggaatcatttcatcaatgtaatgttgtctcatcccaatcacacaggaaacaatgcctgtttcccaagtccaaattataaccccttcacatggatgtttttcctggtttcatgtcctaactacacctatgagattggatcatggattagtttcacagtcatgacacaaacactgccagttggaatttttacacttctgatgagtatccagatgtctttgtgggcacaaaagaaacataagatttatctgagaaaattcaattcatatattcatagaaaatcagcaatgattccattcatattgtaaaaaaagaatcttatctcctatagaaaacagcaacatataaattcaataaataagacttagttaaggatagttaactattatactccaacaattcatgagcaacagtatatacactgagtaaaaatataaaatagtaaaatttcactaaatttagagaaatgcacatggtaataaaaagtataaattataaatgcaattaactaagaacagctctgaatgtatttgcatgggattggtccttgaataaaattgtcttacttcattaatacttcacaatactatttgcataagacaaaataccacagcaaaaaaaaaaatctgattaacaaatgaaaaagcgatctgaacagacatttcccaaaggaagacatatacatggtcaataagtatatttttaaaatgctcaacattaactattcatacagaaatgcaaatcaaaaccacaatgagatatcatctcatcctaattaaggtgactattttcaaaaagacaaaaaatatgacagccgtggtggttcatatctgtaatcctaacactttgacaggccaaggcaggggaattgcttgagttcagaagtttgagatctgggcaacatattgagactctgtctctaaaaagcatattgagactctgtctctacaaaaaaattttaaaaagtaaaaattagctgggcgtggtggcacatgccagtaggtagtcccagctactcgaggttgctccagctcaggcgttcaaggctacagagagccatgattaaaccaaggcactccagcctgggtgacagagtgagactgtctcaaaataaaataaaaataacatattggtgaagatgcgggaaaaaaaaaagaactcttagacactgctggtgggaatgtaaactagagcagccatgtggagaacaacatggactttcttcaaaaattacaaatagaactatcatatgatccagcaataccattactggaaaaaggaaatctgtatattaaagagacatttgaaccctatgtttactgcagcactattcacaatagccaagatataggagcaacctaggtgtccaacaacagatgaatggataaagaaaatgtggtatatatacacaatagaatactatgcagccataaaaactgaattcctgtcattcaggacaacatggatggaattggagggcatatgttaagtgaaacaagccaggaacagaaagttaaacattgcatgttattacttatatgtggaagctaaaaaaattgatatcatagaagtaaaaaataaaacagaggatactacaggctgggaaagctgcagcaaagggagactagagagagatttgttaaaggatacaaagttacagcttggtaggaggaataatttctggtgttctataccactgtaggacgactatagttaagaacattatattccatttagtttcaaatagctaaaaggagattttgtccccaacaaaaagaaatgataaatatttgaaaccatggatactctaatttctctgatctgaccactataaattatatgtattgaaacattattatgtatctcccaaatatgttcaattcttatgtcgctcaaaaaataaaatttaatttaaaaagtaaaaaaaaaaaaaaaaaaaaaaaaaaaaaa

SEQ ID NO: 560 - DNA, 6435 bp, Artificial Sequence
  MTUS1
aaagggggcggcagcgccggcggagcggaggcgggtctcacgtgggccagcgcagagcctgcggaagggacggatgcggatctcgtcgctgtcaccttgaaagtgaccgaggggcttgactgtggactccttacgccgcccacccgggcccggcggtcccagccttctcgcagggccccttctcagcagaagcaagcggggccgagaaagcgggtggaatagggttgctgcaggtcccaaagacccctcgtggcgcctcgctactttctgcagcttgtttgcactttttcacgctctagaaaaatctcatcttaattaagggaacaacaaatcatttaatcttcagagcatcttagactgaaaacctttcaactgtgctgaaaaacctagaagacagaccattttgcccaccctctcatttaaaaggaattgaagaagaaataaaatggcagaggtttaaggttactattcaggatgactgatgataattcagatgataaaatagaagatgaattgcaaaccttctttaccagtgataaagatggaaatacacatgcatacaacccgaaatcaccacctacacaaaactcttcagccagcagtgtgaactggaattctgccaacccagatgacatggtggttgattatgaaactgaccctgctgtagttactggtgaaaatatttctttaagccttcagggtgttgaagtatttggtcatgaaaagtcttctagtgatttcattagtaagcaggtgttagatatgcataaagattctatttgtcagtgtcctgcacttgtaggtactgagaagcccaaatatctgcaacacagttgtcattccctagaagcagttgagggccagagtgttgagccatctttgccttttgtgtggaagcctaatgacaatttgaactgtgcaggctactgtgatgccttggagctaaaccaaacatttgacatgacagtggataaagttaactgcacctttatatcacatcatgccatcggaaagagtcagtccttccatactgctggaagcctgccaccaactggtaggagaagtggaagtacatcttctttatcctattccacttggacatcttcccattctgataagacgcatgcaagagaaactacttatgatagagaaagctttgaaaaccctcaagtcacaccatcagaagcccaagacatgacttacacagcattttctgatgtggtgatgcaaagtgaggtttttgtttcagatattggaaatcagtgtgcatgttcttcaggaaaggtcaccagtgagtacacagatggatcacaacaaagactagttggagaaaaggagacacaagcactaacaccagtttctgatggcatggaagtccccaatgattctgcattacaagagttcttttgtttatcccatgatgaatccaatagcgaaccacattcacagagctcatacaggcacaaggaaatgggccaaaatctgagagagacagtgtcctattgtcttattgatgatgaatgccctttaatggtgccagcttttgataagagcgaagctcaagtgctgaacccagagcataaagtcactgagactgaagacacacaaatggtctccaaaggaaaggatttgggaacccaaaatcatacctcagaattgattctaagtagcccgccaggacaaaaggtgggctcgtcatttggactgacttgggatgcaaatgatatggtcattagcacagacaaaacgatgtgcatgtcaacaccagtcctagaacccacaaaagtaaccttttctgtttcaccgattgaagcgacggagaaatgtaagaaagtggagaagggtaatcgagggcttaaaaacataccagactcgaaggaggcacctgtgaacctgtgtaaacccagtttaggaaaatcaacaatcaaaacgaataccccaataggctgcaaagttagaaaaactgaaattataagttacccaagaccaaacttcaagaatgtcaaagcaaaagttatgtctagagcagtgttgcagcccaaagatgctgctttatcaaaggtcacgcccagacctcagcagaccagtgcctcatcaccctcatcagtgaattcaagacaacaaacagtcttgagcagaacaccgagatctgacttgaatgcagacaaaaaagcagaaattctaattaacaagacacataagcagcagtttaataaactcattactagccaggctgtgcatgttacaactcattctaaaaatgcttcacacagggttccaagaacaacatctgccgtgaaatcgaatcaggaagatgttgacaaagccagttcttctaactcagcatgcgagaccgggtccgtttctgcgttgtttcagaagatcaaaggcatactccctgttaaaatggaaagtgcagaatgtttggaaatgacctatgttcccaacattgataggattagccctgaaaagaagggtgaaaaagaaaatgggacatctatggaaaaacaagagctgaaacaagagattatgaatgagacttttgaatatggttctctgtttttgggctctgcttcaaaaacaacgaccacctcaggtaggaatatatccaagcctgactcctgcggtttgaggcaaatagctgctccaaaagccaaagtggggccccctgtttcctgtttgaggcggaacagtgacaatagaaatcccagtgctgatcgagccgtatctcctcagaggatcaggcgtgtgtccagttctggaaagcctacatccttgaaaactgcacagtcgtcatgggtgaatttgcctagaccacttcctaaatccaaagcatctttgaaaagtcctgcgctgcggaggacaggaagcaccccctcaatagccagcacccacagtgagctgagcacttacagcaacaattctggtaatgccgctgtcatcaaatatgaggagaaacctccaaaaccagcatttcagaatggttcctcaggatccttttatttgaagcctttggtatccagggctcatgttcacttgatgaaaactcctccaaaaggtccttcgagaaaaaatttatttacagctcttaatgcagttgaaaagagcaggcaaaagaatcctcgaagcttatgtatccagccacagacagctcccgatgcgctgccccctgagaaaacacttgaattgacgcaatataaaacaaaatgtgaaaaccaaagtggatttatcctgcagctcaagcagcttcttgcctgtggtaataccaagtttgaggcattgacagttgtgattcagcacctgctgtctgagcgggaggaagcactgaaacaacacaaaaccctatctcaagaacttgttaacctccggggagagctagtcactgcttcaaccacctgtgagaaattagaaaaagccaggaatgagttacaaacagtgtatgaagcattcgtccagcagcaccaggctgaaaaaacagaacgagagaatcggcttaaagagttttacaccagggagtatgaaaagcttcgggacacttacattgaagaagcagagaagtacaaaatgcaattgcaagagcagtttgacaacttaaatgctgcgcatgaaacctctaagttggaaattgaagctagccactcagagaaacttgaattgctaaagaaggcctatgaagcctccctttcagaaattaagaaaggccatgaaatagaaaagaaatcgcttgaagatttactttctgagaagcaggaatcgctagagaagcaaatcaatgatctgaagagtgaaaatgatgctttaaatgaaaaattgaaatcagaagaacaaaaaagaagagcaagagaaaaagcaaatttgaaaaatcctcagatcatgtatctagaacaggagttagaaagcctgaaagctgtgttagagatcaagaatgagaaactgcatcaacaggacatcaagttaatgaaaatggagaaactggtggacaacaacacagcattggttgacaaattgaagcgtttccagcaggagaatgaagaattgaaagctcggatggacaagcacatggcaatctcaaggcagctttccacggagcaggctgttctgcaagagtcgctggagaaggagtcgaaagtcaacaagcgactctctatggaaaacgaggagcttctgtggaaactgcacaatggggacctgtgtagccccaagagatcccccacatcctccgccatccctttgcagtcaccaaggaattcgggctccttccctagccccagcatttcacccagatgacacctccccaaagtccacagactctctgaaagcattttgatgcaggtctgcaggactgaccccaaggaggaacgtgggcacaagaggtatatcagcacacgtgtgatcaccgtagggtaactggagcgtcaccaccggcggaatcgcagcttctgagactggaactctggaggaagacttttgcctccgtccaaaagattcctccaaaaaaagatttaaaaaaagatttcggcatcgacacggacgttgttgcacaaagcacttaaagaacgagagcatcttgttcattgcctttttcacctaagcatagggggaaaaactctcagggccctattaagatttataacctttgtaatgttcttcaccacagacaccttcttgtgagttttcagtctgactgtgggggtggggggtgtgaatgaaatggatgtcacagagtgtcatgtgtctgatgcagcctcctctgctgtgtattaaatgtcaaaatctgaatatatctggatatgtactaatcaaataataatcaatcaatcagcatatacatttcagccaaagccatagaagaaaaagcaatagttgcttgaattatgatcatctaccaccaactctgctcagccctgtaacagggtagggagagggtataacaggaagagctttgacttgtccctgtctatacattctctgtatcttttgggggtaacttcttggcagtttttcagtgttcagccatgtcagttgaaactagatttttctgtagattttttacttacccatgtgagcctaacactatcctgtaattcattttctcaggctatgtgtaaatgtagaaccctaatttttctataaaaaaacaaactaactaactaactgtgtaaagaaagaaaaagggaagtaccaatgggtttttccaccttatttttacctttgatctacccttgcagatttaacctgtcttcttccctcccattattctcattttccttttacctttctccaccatccagagccacaaaagcaaaccttctacctcctacctacttttctctgggacaaggataaaggaatatgattttccagagccccagagccagctcatcttccaggtgctgaaaccactttccaaataaactaaagcctggatttgatattacaaattttgggaaatcttagaataaagaacgagaacaaggaagtcattggctagtataattaagaaaggtaggattcagtgcttaccgatgatgcagtacttgatagaagaaaacagtctgggaggatagcgctcatttttcagttaccctttaaggagtccctttgtctttgggaaagtagcagaatggtccgcttctttcccatgagtggaaaatgtggcttgtccaactctcctccaggttgcatttcagtttctttccaaaacttattacctcccctaatcctgagactttggaaaaggtggaaggaagaactgttgctttatctccccctccctgcatgtgtcaacattgtgatgtcagtatttactaatctacattcagtggctgtacaaataacagctgtagtaagaagagattcaggatgctagaggtgaatatttgggtcatttacatgtacactacatagcaagttgatactcatgttgcatgttcttttaaattagtgattttgtgtcttaagtctttaacttccaatacttcatcatgtatgtaaccttccatgtttgcttctgataaatggaaatgtaggttcactgccacttcatgagatatctctgctcacgcttccaagttgttctcaatgacattagccaaagttgggtttgccattcatcccctaggcatggtaaatcttgtgttgttccctgctgtcctccgtattacgtgaccggcaaataaatctcatagcagttaatataaaacatctttggaggatgggagagaacaggagggaagatgggaaacaaaatagagaattcttaagattttgtttaaaccaaatgtttcatgtagaatgcaaaatgttggcacgtcaaaaatatgaatgtgtagacaactgtagttgtgctcagtttgtagtgatgggaagtgtattttactctgatcaaataaataatgctggaatactcaagaattgcaaaaaaaaaaaaaaaaa

SEQ ID NO: 561 - DNA, 1653 bp, Artificial Sequence
  KRT14
acccgagcaccttctcttcactcagccaactgctcgctcgctcacctccctcctctgcaccatgaccacctgcagccgccagttcacctcctccagctccatgaagggctcctgcggcatcgggggcggcatcgggggcggctccagccgcatctcctccgtcctggccggagggtcctgccgcgcccccagcacctacgggggcggcctgtctgtctcatcctcccgcttctcctctgggggagcctacgggctggggggcggctatggcggtggcttcagcagcagcagcagcagctttggtagtggctttgggggaggatatggtggtggccttggtgctggcttgggtggtggctttggtggtggctttgctggtggtgatgggcttctggtgggcagtgagaaggtgaccatgcagaacctcaatgaccgcctggcctcctacctggacaaggtgcgtgctctggaggaggccaacgccgacctggaagtgaagatccgtgactggtaccagaggcagcggcctgctgagatcaaagactacagtccctacttcaagaccattgaggacctgaggaacaagattctcacagccacagtggacaatgccaatgtccttctgcagattgacaatgcccgtctggccgcggatgacttccgcaccaagtatgagacagagttgaacctgcgcatgagtgtggaagccgacatcaatggcctgcgcagggtgctggacgaactgaccctggccagagctgacctggagatgcagattgagagcctgaaggaggagctggcctacctgaagaagaaccacgaggaggagatgaatgccctgagaggccaggtgggtggagatgtcaatgtggagatggacgctgcacctggcgtggacctgagccgcattctgaacgagatgcgtgaccagtatgagaagatggcagagaagaaccgcaaggatgccgaggaatggttcttcaccaagacagaggagctgaaccgcgaggtggccaccaacagcgagctggtgcagagcggcaagagcgagatctcggagctccggcgcaccatgcagaacctggagattgagctgcagtcccagctcagcatgaaagcatccctggagaacagcctggaggagaccaaaggtcgctactgcatgcagctggcccagatccaggagatgattggcagcgtggaggagcagctggcccagctccgctgcgagatggagcagcagaaccaggagtacaagatcctgctggacgtgaagacgcggctggagcaggagatcgccacctaccgccgcctgctggagggcgaggacgcccacctctcctcctcccagttctcctctggatcgcagtcatccagagatgtgacctcctccagccgccaaatccgcaccaaggtcatggatgtgcacgatggcaaggtggtgtccacccacgagcaggtccttcgcaccaagaactgaggctgcccagccccgctcaggcctaggaggccccccgtgtggacacagatcccactggaagatcccctctcctgcccaagcacttcacagctggaccctgcttcaccctcaccccctcctggcaatcaatacagcttcattatctgagttgcataaaaaaaaaaaaaaaaaaa

SEQ ID NO: 562 - DNA, 4206 bp, Artificial Sequence
  NOS2
ataactttgtagcgagtcgaaaactgaggctccggccgcagagaactcagcctcattcctgctttaaaatctctcggccacctttgatgaggggactgggcagttctagacagtcccgaagttctcaaggcacaggtctcttcctggtttgactgtccttaccccggggaggcagtgcagccagctgcaagccccacagtgaagaacatctgagctcaaatccagataagtgacataagtgacctgctttgtaaagccatagagatggcctgtccttggaaatttctgttcaagaccaaattccaccagtatgcaatgaatggggaaaaagacatcaacaacaatgtggagaaagccccctgtgccacctccagtccagtgacacaggatgaccttcagtatcacaacctcagcaagcagcagaatgagtccccgcagcccctcgtggagacgggaaagaagtctccagaatctctggtcaagctggatgcaaccccattgtcctccccacggcatgtgaggatcaaaaactggggcagcgggatgactttccaagacacacttcaccataaggccaaagggattttaacttgcaggtccaaatcttgcctggggtccattatgactcccaaaagtttgaccagaggacccagggacaagcctacccctccagatgagcttctacctcaagctatcgaatttgtcaaccaatattacggctccttcaaagaggcaaaaatagaggaacatctggccagggtggaagcggtaacaaaggagatagaaacaacaggaacctaccaactgacgggagatgagctcatcttcgccaccaagcaggcctggcgcaatgccccacgctgcattgggaggatccagtggtccaacctgcaggtcttcgatgcccgcagctgttccactgcccgggaaatgtttgaacacatctgcagacacgtgcgttactccaccaacaatggcaacatcaggtcggccatcaccgtgttcccccagcggagtgatggcaagcacgacttccgggtgtggaatgctcagctcatccgctatgctggctaccagatgccagatggcagcatcagaggggaccctgccaacgtggaattcactcagctgtgcatcgacctgggctggaagcccaagtacggccgcttcgatgtggtccccctggtcctgcaggccaatggccgtgaccctgagctcttcgaaatcccacctgaccttgtgcttgaggtggccatggaacatcccaaatacgagtggtttcgggaactggagctaaagtggtacgccctgcctgcagtggccaacatgctgcttgaggtgggcggcctggagttcccagggtgccccttcaatggctggtacatgggcacagagatcggagtccgggacttctgtgacgtccagcgctacaacatcctggaggaagtgggcaggagaatgggcctggaaacgcacaagctggcctcgctctggaaagaccaggctgtcgttgagatcaacattgctgtgctccatagtttccagaagcagaatgtgaccatcatggaccaccactcggctgcagaatccttcatgaagtacatgcagaatgaataccggtcccgtgggggctgcccggcagactggatttggctggtccctcccatgtctgggagcatcacccccgtgtttcaccaggagatgctgaactacgtcctgtcccctttctactactatcaggtagaggcctggaaaacccatgtctggcaggacgagaagcggagacccaagagaagagagattccattgaaagtcttggtcaaagctgtgctctttgcctgtatgctgatgcgcaagacaatggcgtcccgagtcagagtcaccatcctctttgcgacagagacaggaaaatcagaggcgctggcctgggacctgggggccttattcagctgtgccttcaaccccaaggttgtctgcatggataagtacaggctgagctgcctggaggaggaacggctgctgttggtggtgaccagtacgtttggcaatggagactgccctggcaatggagagaaactgaagaaatcgctcttcatgctgaaagagctcaacaacaaattcaggtacgctgtgtttggcctcggctccagcatgtaccctcggttctgcgcctttgctcatgacattgatcagaagctgtcccacctgggggcctctcagctcaccccgatgggagaaggggatgagctcagtgggcaggaggacgccttccgcagctgggccgtgcaaaccttcaaggcagcctgtgagacgtttgatgtccgaggcaaacagcacattcagatccccaagctctacacctccaatgtgacctgggacccgcaccactacaggctcgtgcaggactcacagcctttggacctcagcaaagccctcagcagcatgcatgccaagaacgtgttcaccatgaggctcaaatctcggcagaatctacaaagtccgacatccagccgtgccaccatcctggtggaactctcctgtgaggatggccaaggcctgaactacctgccgggggagcaccttggggtttgcccaggcaaccagccggccctggtccaaggtatcctggagcgagtggtggatggccccacaccccaccagacagtgcgcctggaggccctggatgagagtggcagctactgggtcagtgacaagaggctgcccccctgctcactcagccaggccctcacctacttcctggacatcaccacacccccaacccagctgctgctccaaaagctggcccaggtggccacagaagagcctgagagacagaggctggaggccctgtgccagccctcagagtacagcaagtggaagttcaccaacagccccacattcctggaggtgctagaggagttcccgtccctgcgggtgtctgctggcttcctgctttcccagctccccattctgaagcccaggttctactccatcagctcctcccgggatcacacgcccacagagatccacctgactgtggccgtggtcacctaccacacccgagatggccagggtcccctgcaccacggcgtctgcagcacatggctcaacagcctgaagccccaagacccagtgccctgctttgtgcggaatgccagcggcttccacctccccgaggatccctcccatccttgcatcctcatcgggcctggcacaggcatcgcgcccttccgcagtttctggcagcaacggctccatgactcccagcacaagggagtgcggggaggccgcatgaccttggtgtttgggtgccgccgcccagatgaggaccacatctaccaggaggagatgctggagatggcccagaagggggtgctgcatgcggtgcacacagcctattcccgcctgcctggcaagcccaaggtctatgttcaggacatcctgcggcagcagctggccagcgaggtgctccgtgtgctccacaaggagccaggccacctctatgtttgcggggatgtgcgcatggcccgggacgtggcccacaccctgaagcagctggtggctgccaagctgaaattgaatgaggagcaggtcgaggactatttctttcagctcaagagccagaagcgctatcacgaagatatctttggtgctgtatttccttacgaggcgaagaaggacagggtggcggtgcagcccagcagcctggagatgtcagcgctctgagggcctacaggaggggttaaagctgccggcacagaacttaaggatggagccagctctgcattatctgaggtcacagggcctggggagatggaggaaagtgatatcccccagcctcaagtcttatttcctcaacgttgctccccatcaagccctttacttgacctcctaacaagtagcaccctggattgatcggagcctcctctctcaaactggggcctccctggtcccttggagacaaaatcttaaatgccaggcctggcaagtgggtgaaagatggaacttgctgctgagtgcaccacttcaagtgaccaccaggaggtgctatcgcaccactgtgtatttaactgccttgtgtacagttatttatgcctctgtatttaaaaaactaacacccagtctgttccccatggccacttgggtcttccctgtatgattccttgatggagatatttacatgaattgcattttactttaatcaca

SEQ ID NO: 563 - DNA, 5496 bp, Artificial Sequence
  ATP1A2
atttaaagctaccctgttgctttggctttctctgtctgccagggtctccgactgtcccagacgggctggtgtgggcttgggatcctcctggtgacctctcccgctaaggtccctcagccactctgccccaagatgggccgtggggctggccgtgagtactcacctgccgccaccacggcagagaatgggggcggcaagaagaaacagaaggagaaggaactggatgagctgaagaaggaggtggcaatggatgaccacaagctgtccttggatgagctgggccgcaaataccaagtggacctgtccaagggcctcaccaaccagcgggctcaggacgttctggctcgagatgggcccaacgccctcacaccacctcccacaacccctgagtgggtcaagttctgccgtcagcttttcggggggttctccatcctgctgtggattggggctatcctctgcttcctggcctacggcatccaggctgccatggaggatgaaccatccaacgacaatctatatctgggtgtggtgctggcagctgtggtcattgtcactggctgcttctcctactaccaggaggccaagagctccaagatcatggattccttcaagaacatggtacctcagcaagcccttgtgatccgggagggagagaagatgcagatcaacgcagaggaagtggtggtgggagacctggtggaggtgaagggtggagaccgcgtccctgctgacctccggatcatctcttctcatggctgtaaggtggataactcatccttaacaggagagtcggagccccagacccgctcccccgagttcacccatgagaaccccctggagacccgcaatatctgtttcttctccaccaactgtgttgaaggcactgccaggggcattgtgattgccacaggagaccggacggtgatgggccgcatagctactctcgcctcaggcctggaggttgggcggacacccatagcaatggagattgaacacttcatccagctgatcacaggggtcgctgtattcctgggggtctccttcttcgtgctctccctcatcctgggctacagctggctggaggcagtcatcttcctcatcggcatcatagtggccaacgtgcctgaggggcttctggccactgtcactgtgtgcctgaccctgacagccaagcgcatggcacggaagaactgcctggtgaagaacctggaggcggtggagacgctgggctccacgtccaccatctgctcggacaagacgggcaccctcacccagaaccgcatgaccgtcgcccacatgtggttcgacaaccaaatccatgaggctgacaccaccgaagatcagtctggggccacttttgacaaacgatcccctacgtggacggccctgtctcgaattgctggtctctgcaaccgcgccgtcttcaaggcaggacaggagaacatctccgtgtctaagcgggacacagctggtgatgcctctgagtcagctctgctcaagtgcattgagctctcctgtggctcagtgaggaaaatgagagacagaaaccccaaggtggcagagattcctttcaactctaccaacaagtaccagctgtctatccacgagcgagaagacagcccccagagccacgtgctggtgatgaagggggccccagagcgcattctggaccggtgctccaccatcctggtgcagggcaaggagatcccgctcgacaaggagatgcaagatgcctttcaaaatgcctacatggagctggggggacttggggagcgtgtgctgggattctgtcaactgaatctgccatctggaaagtttcctcggggcttcaaattcgacacggatgagctgaactttcccacggagaagctttgctttgtggggctcatgtctatgattgaccctccccgggctgctgtgccagatgctgtgggcaagtgccgaagcgcaggcatcaaggtgatcatggtaaccggggatcaccctatcacagccaaggccattgccaaaggcgtgggcatcatatcagagggtaacgagactgtggaggacattgcagcccggctcaacattcccatgagtcaagtcaaccccagagaagccaaggcatgcgtggtgcacggctctgacctgaaggacatgacatcggagcagctcgatgagatcctcaagaaccacacagagatcgtctttgctcgaacgtctccccagcagaagctcatcattgtggagggatgtcagaggcagggagccattgtggccgtgacgggtgacggggtgaacgactcccctgcattgaagaaggctgacattggcattgccatgggcatctctggctctgacgtctctaagcaggcagccgacatgatcctgctggatgacaactttgcctccatcgtcacgggggtggaggagggccgcctgatctttgacaacttgaagaaatccatcgcctacaccctgaccagcaacatccccgagatcacccccttcctgctgttcatcattgccaacatccccctacctctgggcactgtgaccatcctttgcattgacctgggcacagatatggtccctgccatctccttggcctatgaggcagctgagagtgatatcatgaagcggcagccacgaaactcccagacggacaagctggtgaatgagaggctcatcagcatggcctacggacagatcgggatgatccaggcactgggtggcttcttcacctactttgtgatcctggcagagaacggtttcctgccatcacggctactgggaatccgcctcgactgggatgaccggaccatgaatgatctggaggacagctatggacaggagtggacctatgagcagcggaaggtggtggagttcacgtgccacacggcattctttgccagcatcgtggtggtgcagtgggctgacctcatcatctgcaagacccgccgcaactcagtcttccagcagggcatgaagaacaagatcctgatttttgggctcctggaggagacggcgttggctgcctttctctcttactgcccaggcatgggtgtagccctccgcatgtacccgctcaaagtcacctggtggttctgcgccttcccctacagcctcctcatcttcatctatgatgaggtccgaaagctcatcctgcggcggtatcctggtggctgggtggagaaggagacatactactgaccccattggaagaagaaccaggcatggaaagatggggagctctggaggtgttgtggggatggtgatggagagggatggaaataacgggtggcattgggtggcaacatttggggagagataatgaggcaactcagcaggctaagttgcggggtatataaattggggtgatgaccccatagacctaactgtgaacaatcagattagacactatgtgttagagtccccccgaccagatccttttccatcccactccactatgttgtctattttttctgaggaattaagggttaccccaccctgcccactcccatcccttcaaccccacttcctactgtaatagatcagcatccaaaagcaggaacccatctaaaccagaaggaagccctctcagatcaccccagcctcactccatttcccacttccacccccgttagcttcctgcaggactctatccctggcttccccttcagaccttgcaatcacaaaaggttcttctggtgagtgcaagagcctgagactggaaaaggtggacttgtctcccagtcgaggctggtaagggaccttcagggagagctgggcagacaggtgggagatggaggtagggctggctggaggaaggaaacaacaaaggaagtgaggtagtgccaatgacaggacatttgacatgagtctccagatagatgtcgtggactccagctctacgtcccacattttagaataccccaccagcagaacaaactcagatctcatcagggtagcagcagaggcaggaccagaaggcaatcaagagcttccagaaatgccacacttgtgtgccacagagttccccgctgacccttggttaggggtcctcttagtccacaaggtccggatgtcactcatgtacttaataacacttcaccttctgtaatactaagtcctcagagctccatgctgttctgaaagggatggccacaagttctttcccagcctcttccattccctttcttttcatgcccatcccgatgaacctgcatcattccccgacactgccaagccaaccctggaaaaggagttcgctggccattggctagaatcagggtggagaagttccctgaaccttcctgtctcccagggacatgtatgcttccagggacaagcttaggtcatgaacatggtcagaacctttggacaagaggaaaaatactaagagatttgctttttctgggtgcggtggctcatgcctgtaatcccagcactttgggaggccgaggcaggtggatcatgaggtcaggagttcgaggcgagcctggccaacatggtgaaaccctgtctctactaaaagtacaaaaaattagccagtcatggtggcacacgcctgtaatctcagctactcaggaggctgaggcaggagaattgcttgaacctgtgaggaagaggttgcagtgagctgagatcgtgccattacactccagcctgggcgaaagggtgagactccatctcaaaaaaaaaaaaaatgatttgcttttgacgtcttaggtggcagggctgttccctccaggcaaatgcccttcaaaccgacgatcattgtgcccacttaccctgggctggagagttggtttcaggttcctacaggagatagctttctttcccttactccctatctaacacttttgctctgcaggcagccttgcccattctctaagcctggcttagaaggcactgggaatgtcctgtagagagagacctagataggtcatgcaagtgagaaagacatctgaggaaaatggaagacctaaggcagacaggaaggaagcacaaaagacaagcattgggtcagacccataaaccacctcccaaaggctgtcatttcattgcactggaattttgctttatcagaagcaaggaagtaagggagtcattgccttgggcctgggaatctaagtgggagacaatattaatttggatccgattaattggagattactaactgtggacaaaagtttatctttgcacaatcaataaaaatggcatttttttagtaaattaagagcataaacaatattgctagaggtggcatgtttagtctaccaaaaacaatacttttcaggcactttagaaatatccttttagaagcagcgagtgcatgggctaattatcatcaatctttatgtatttgttaaagaaacatctacaggatctttattggtgaccttttgtaagacattagtttgaggtactacctatgtacttgaaaataataaagtggcatttctttatgaaaaaaaaaaaaaaaaaaaaaaaaaaaaaaaaaaaaaaaaa

SEQ ID NO: 564 - DNA, 1143 bp, Artificial Sequence
  IFNA2
gagaacctggagcctaaggtttaggctcacccatttcaaccagtctagcagcatctgcaacatctacaatggccttgacctttgctttactggtggccctcctggtgctcagctgcaagtcaagctgctctgtgggctgtgatctgcctcaaacccacagcctgggtagcaggaggaccttgatgctcctggcacagatgaggagaatctctcttttctcctgcttgaaggacagacatgactttggatttccccaggaggagtttggcaaccagttccaaaaggctgaaaccatccctgtcctccatgagatgatccagcagatcttcaatctcttcagcacaaaggactcatctgctgcttgggatgagaccctcctagacaaattctacactgaactctaccagcagctgaatgacctggaagcctgtgtgatacagggggtgggggtgacagagactcccctgatgaaggaggactccattctggctgtgaggaaatacttccaaagaatcactctctatctgaaagagaagaaatacagcccttgtgcctgggaggttgtcagagcagaaatcatgagatctttttctttgtcaacaaacttgcaagaaagtttaagaagtaaggaatgaaaactggttcaacatggaaatgattttcattgattcgtatgccagctcacctttttatgatctgccatttcaaagactcatgtttctgctatgaccatgacacgatttaaatcttttcaaatgtttttaggagtattaatcaacattgtattcagctcttaaggcactagtcccttacagaggaccatgctgactgatccattatctatttaaatatttttaaaatattatttatttaactatttataaaacaacttatttttgttcatattatgtcatgtgcacctttgcacagtggttaatgtaataaaatatgttctttgtatttggtaaatttattttgtgttgttcattgaacttttgctatggaaacttttgtacttgtttattctttaaaatgaaattccaagcctaattgtgcaacctgattacagaataactggtacacttcatttatccatcaatattatattcaagatataagtaaaaataaactttctgtaaacca

SEQ ID NO: 565 - DNA, 2426 bp, Artificial Sequence
  ALDOB
atctgtcttatttggcagctgctgcctcacccacagcttttgatatctaggaggactcttctctcccaaactacctgtcaccatggcccaccgatttccagccctcacccaggagcagaagaaggagctctcagaaattgcccagagcattgttgccaatggaaaggggatcctggctgcagatgaatctgtaggtaccatggggaaccgcctgcagaggatcaaggtggaaaacactgaagagaaccgccggcagttccgagaaatcctcttctctgtggacagttccatcaaccagagcatcgggggtgtgatccttttccacgagaccctctaccagaaggacagccagggaaagctgttcagaaacatcctcaaggaaaaggggatcgtggtgggaatcaagttagaccaaggaggtgctcctcttgcaggaacaaacaaagaaaccaccattcaagggcttgatggcctctcagagcgctgtgctcagtacaagaaagatggtgttgactttgggaagtggcgtgctgtgctgaggattgccgaccagtgtccatccagcctcgctatccaggaaaacgccaacgccctggctcgctacgccagcatctgtcagcagaatggactggtacctattgttgaaccagaggtaattcctgatggagaccatgacctggaacactgccagtatgttactgagaaggtcctggctgctgtctacaaggccctgaatgaccatcatgtttacctggagggcaccctgctaaagcccaacatggtgactgctggacatgcctgcaccaagaagtatactccagaacaagtagctatggccaccgtaacagctctccaccgtactgttcctgcagctgttcctggcatctgctttttgtctggtggcatgagtgaagaggatgccactctcaacctcaatgctatcaacctttgccctctaccaaagccctggaaactaagtttctcttatggacgggccctgcaggccagtgcactggctgcctggggtggcaaggctgcaaacaaggaggcaacccaggaggcttttatgaagcgggccatggctaactgccaggcggccaaaggacagtatgttcacacgggttcttctggggctgcttccacccagtcgctcttcacagcctgctatacctactagggtccaatgcccgccagcctagctccagtgcttctagtaggagggctgaaagggagcaacttttcctccaatcctggaaattcgacacaattagatttgaactgctggaaatacaacacatgttaaatcttaagtacaagggggaaaaaataaatcagttattgaaacataaaaatgaataccaaggacctgatcaaatttcacacagcagtttccttgcaacactttcagctccccatgctccagaatacccacccaagaaaataataggctttaaaacaatatcggctcctcatccaaagaacaactgctgattgaaacacctcattagctgagtgtagagaagtgcatcttatgaaacagtcttagcagtggtaggttgggaaggagatagctgcaaccaaaaaagaaataaatattctataaaccttcagctgctatcgggtttcacttttctgctcttgctgtccaaagactcagtgtatttcattacttttgactctactagacatgactgggtttcaacagtaaaggtcttcaactcttgctagtcattggaatcaagccgcaaaattttaaaaactgagatgctcaggccacaccccagctcaattaaatcagaaaccctagacttgggatcctctaactattagatttcttaaagctccctcagtaattccaatgtacagtcaagtttgagaactaccaatctaaatttcaagtttgagggtatttgaaaattaaagccattcacaatacgaagccagctaaaaatgtagaatgattttgagcaacttgtggagtataataagagaattaatgtgacttcaatgcttggagcattcttgttcaagtggcccaggtttggtgaaacaggactaccttgtcatctgcacgtccaggcatatttcgtagttttgcagtaaataatattcacataatgatactgtattgactttcaattttcagaattaacctatagttacagcacttaagacaaccagagttataaaagagaatttaaatattataactttggacaatataaaagtgatgatttaactgacagaagctaggaaatataagggggaggagaagtggaagaaagcaaagagagtcaggaatactacttaaaactgatgggttaagaaatagtgctttaattctatttaagtaataaaagaaatggatgtaaatcataaaaatatatatctaaaattaaaatattgatggtagtatgctaaatttc

SEQ ID NO: 566 - DNA, 2149 bp, Artificial Sequence
  ACAT1
ggccgctaggggtgcggggttggggaggaggccgctagtctacgcctgtggagccgatactcagccctctgcgaccatggctgtgctggcggcacttctgcgcagcggcgcccgcagccgcagccccctgctccggaggctggtgcaggaaataagatatgtggaacggagttatgtatcaaaacccactttgaaggaagtggtcatagtaagtgctacaagaacacccattggatcttttttaggcagcctttccttgctgccagccactaagcttggttccattgcaattcagggagccattgaaaaggcagggattccaaaagaagaagtgaaagaagcatacatgggtaatgttctacaaggaggtgaaggacaagctcctacaaggcaggcagtattgggtgcaggcttacctatttctactccatgtaccaccataaacaaagtttgtgcttcaggaatgaaagccatcatgatggcctctcaaagtcttatgtgtggacatcaggatgtgatggtggcaggtgggatggagagcatgtccaatgttccatatgtaatgaacagaggatcaacaccatatggtggggtaaagcttgaagatttgattgtaaaagacgggctaactgatgtctacaataaaattcatatgggcagctgtgctgagaatacagcaaagaagctgaatattgcacgaaatgaacaggacgcttatgctattaattcttataccagaagtaaagcagcatgggaagctgggaaatttggaaatgaagttattcctgtcacagttacagtaaaaggtcaaccagatgtagtggtgaaagaagatgaagaatataaacgtgttgattttagcaaagttccaaagctgaagacagttttccagaaagaaaatggcacagtaacagctgccaatgccagtacactgaatgatggagcagctgctctggttctcatgacggcagatgcagcgaagaggctcaatgttacaccactggcaagaatagtagcatttgctgacgctgctgtagaacctattgattttccaattgctcctgtatatgctgcatctatggttcttaaagatgtgggattgaaaaaagaagatattgcaatgtgggaagtaaatgaagcctttagtctggttgtactagcaaacattaaaatgttggagattgatccccaaaaagtgaatatcaatggaggagctgtttctctgggacatccaattgggatgtctggagccaggattgttggtcatttgactcatgccttgaagcaaggagaatacggtcttgccagtatttgcaatggaggaggaggtgcttctgccatgctaattcagaagctgtagacaacctctgctatttaaggagacaaccctatgtgaccagaaggcctgctgtaatcagtgtgactactgtgggtcagcttatattcagataagctgtttcattttttattattttctatgttaacttttaaaaatcaaaatgatgaaatcccaaaacattttgaaattaaaaataaatttcttcttctgcttttttcttggtaaccttgaaaagtttgatacatttttgcattctgagtctatacttatcgaaatatggtagaaataccaatgtgtaatattagtgacttacataagtagctagaagtttccatttgtgagaacacatttatatttttgaggattgttaaaggtcaagtgaatgctctttataggtaatttacatttagtaaattacggtaaattaaattacttctctttacagtaagagttggctattctggacaaactagcagtgcttcatataatcactcaaaccacagtgtgtgcagcagtactagaaacaagacagaagcccatgtcctcagggtctagagtgggggcaatttcttataacctcaacattcagggttgggggaggtcaagcagaaaaccctggagtttgggctctgaattactatagcagcatagagagtgggaagggaggtagaaactgatatgctgaatggatatataaaaaagggaacagatcaccacttccaatacacgacaatgcctgttcttaagcaggacagactgtaacagaagtatctcgcattgcattttatctgggaaaaaaaaaaaaaaaaa

SEQ ID NO: 567 - DNA, 3850 bp, Artificial Sequence
  STXBP1
cccgcgcgcgccggcggcggggcagcctcgctctggctcgcgccgcgcccccgcgcccagtccgcgcgtcagtcggtccctagcgcggctgcggggcggagagctgcggctggcccagcgcgcccacctgaggaggcggcggggtccgcaggcgtcgcgggacgaggagatcggagccgggagactcgcgcagcgccatggcccccattggcctcaaagctgttgtcggagagaagattatgcatgatgtgataaagaaggtcaagaagaagggggaatggaaggtgctggtggtggatcagttaagcatgaggatgctgtcctcctgctgcaagatgacagacatcatgaccgagggcataacgattgtggaagatatcaataagcgcagagagccgctccccagcctggaggctgtgtatctcatcactccatccgagaagtccgtccactctctcatcagtgactttaaggacccgccgactgctaaataccgggctgcacacgtcttcttcactgactcttgtccagatgccctgtttaatgaactggtaaaatcccgagcagccaaagtcatcaaaactctgacggaaatcaatattgcatttctcccgtatgaatcccaggtctattccttggactctgctgactctttccaaagcttctacagtccccacaaggctcagatgaagaatcctatactggagcgcctggcagagcagatcgcgaccctttgtgccaccctgaaggagtacccggctgtgcggtatcggggggaatacaaggacaatgccctgctggctcagctaatccaggacaagctcgatgcctataaagctgatgatccaacaatgggggagggcccagacaaggcacgctcccagctcctgatcctggatcgaggctttgaccccagctcccctgtgctccatgaattgacttttcaggctatgagttatgatctgctgcctatcgaaaatgatgtatacaagtatgagaccagcggcatcggggaggcacgggtgaaggaggtgctcctggacgaggacgacgacctgtggatagcactgcgccacaagcacatcgcagaggtgtcccaggaagtcacccggtctctgaaagatttttcttctagcaagagaatgaatactggagagaagaccaccatgcgggacctgtcccagatgctgaagaagatgcctcagtaccagaaagagctcagcaagtactccacccacctgcaccttgctgaggactgtatgaagcattaccaaggcaccgtagacaaactctgccgagtggagcaggacctggccatgggcacagatgctgagggagagaagatcaaggaccctatgcgagccatcgtccccattctgctggatgccaatgtcagcacttatgacaaaatccgcatcatccttctctacatctttttgaagaatggcatcacggaggaaaacctgaacaaactgatccagcacgcccagatacccccggaggatagtgagatcatcaccaacatggctcacctcggcgtgcccatcgtcaccgattccacgctgcgtcgccggagcaagccggagcggaaggaacgcatcagcgagcagacctaccagctctcacggtggactccgattatcaaggacatcatggaggacactattgaggacaaacttgacaccaaacactacccttatatctctacccgttcctctgcctccttcagcaccaccgccgtcagcgcccgctatgggcactggcataagaacaaggccccaggcgagtaccgcagtggcccccgcctcatcattttcatccttgggggtgtgagcctgaatgagatgcgctgcgcctacgaggtgacccaggccaacggaaagtgggaggtgctgataggatccacacacatcctcaccccacagaaactgctggacacactgaagaaactgaataaaacagatgaagaaataagcagttaaaaaaataagtcgcccctccaaaacacgcccccatcccacagcgctccgcagcttcccaccaccgcccgcctcagttcctttgcgtctgttgcctccccagccctgcacgccctggctggcactgttgccgctgcattctcgtgttcagtgatgccctcttcttgtttgaaacaaaagaaaataatgcattgtgttttttaaaaagagtatcttatacatgtatcctaaaaagagaagctcatgtgcaattggtgcacagcaggagaaatttctggactgttaggatgaatggacgccttctccccgttatttaagatttgtgaccttgtacataaccctgggtgacgtgcacattgcttgggtatggaacggtagaaatttgggtgtttttaaaaccttgtttggggttgttcctgtccttgttgagaatcatagagatgtctgtgttcttggagtatttcacactgaggactaatctgctatcttcattccagtccctacccctcagtgcctgctctcatccaaataacctgggaggtgacaatcaggatatctcaggaggtccaaggtggaacagacctctttgcctttcccagcgtctcatacccccggtagtgcagctgtgggtggaggctggggtgtctgcacgaagtcaggccagcgtcctcctccacagcctgtcactgccccctccccagcctgtgtccacagtgctgtgatcccgagggaagtcctccagtctaagtcacagtgccctgacaggtgagaagcaaactcccgctggaagcctccatctctttggaaaaacagttagtctggagcctgtggcccaggcccttctgtccccaggcatcatcccaacagctcattttccctagtccgccttcgttcaagggtcaggaatggaccagaacagatgggttctggaggcccctgaacagagggctatggctgtggagaaggttcttggcccgttggactcacacagaccctgtaccctctcggcaagcatcttcagtcagattatcctcagtttcagatacttcataataccttgtgttgtgtggggtcatacatcatcgtgtttgtaagagaagatggtcattttattctctgtataaaacttagctctaaagcagaaactaaagcagcaaatgcaggaaggctgtctcgccatcctcaagactcagcagctctcattctccagtggtgagcacaccatttgtgctgctgctgttgtcgtgaaatataataacagtggaagtcacaaaaatgtcccctgcccagccccctcgccgcccttgacctcctgcaggccatgtgtgtattacttgtctagtgatgtcctctcaaagtgctgtacgcgagctcggcgccacctccgcctccctttcagagcctgctccccgccctctctgctcgctgcattgtggtgttctcttctcaaggctttgaaatctccccttgcactgagattagtcgtcagatctctccccgtctccctcccaacttatacgacctgatttccttaggacggaaccgcaggcacctgcgccgggcgtcttactcccgctgcttgttctgtcccctccctcggaccaaacagtgctcatgcttcaggaccttgtttgtcgaagatgttggtttccctttctctgttatttatataaaaataatttatcaaaaggatattttaaaaaagctagtctgtcttgaaacttgtttaccttaaaattatcagaatctcagtgtttgaaagtactgaagcacaaacatatatcatctctgtaccattctgtactaaagcacttgagtctaataaataaagaaatcagcaccccttcccggtgtccagggggaaaaaaaaa

SEQ ID NO: 568 - DNA, 601 bp, Artificial Sequence
  HTN3
gggagatttcaacgtgtttaaatacatcagccatctaggaaaggacatctcttgagacttcacttcagcttcactgacttctggattctcctcttgagtaaaaggactcagccaactatgaagttttttgtttttgctttaatcttggctctcatgctttccatgactggagctgattcacatgcaaagagacatcatgggtataaaagaaaattccatgaaaagcatcattcacatcgaggctatagatcaaattatctgtatgacaattgatatcttcagtaatcacggggcatgattatggaggtttgactggcaaattcgctttggactcgtgtattctcatttgtcataccgcatcacactaccactgctttttgaagaattatcataaggcaatgcagaataaaagaaataccatgatttagtgaattctgtgtttcaggatacttcccttcctaattatcatttgattagatacttgcaatttaaatgttaagctgttttcactgctgtttctgagtaatagaaattcattcctctccaaaagcaataaaattcaagcacattattatgtgaaaaaaaaaaaaaaaaaaaaaaa

SEQ ID NO: 569 - DNA, 3678 bp, Artificial Sequence
  NHSL2
atgccgttctacaggcgcacggtggtaccccagcgcctgtgcccgcgcaacccgccgcagcagctggcggagctccgcgacgtgagccacctggcagcgctcagcctgctccggcagctcgccgacctctgtggccactcgttggctctgctcgaggacctcgaggggcacctgctggccctggggcgccgcacagacagcctgtaccggcgcaccgtgcgcctccgccgccgccttccctgccgcctgcttggcccggaggaggacgaggaagagctagctgcagctaactcgggtcgggaaaatgcgacagcgactgcccactcgaggtcgtcatggcgacagccagtgaacgtgttcctctcctcgggcaggcccccgagtgtagaggagctgcttcgggaggcgcagctcaatctccagagcctgttgcaagaagaatatgaggaacagtactcggaggccagacttgtggggcagaccttccgctcttctgatgaggccactaagcccacccccaacccaaggccccagtctgccaggcgtctggagtttatattgatgcctacaaaacggcagctgagcgaggatgagactaccacccagggtgtgagggcccccgaggcctccctgagcctgtctaccacagccgacaagcaaactgcctggaatagccttttccctctgcccatcctagaggagaagcggtggcctcagctttgctccacgcagtctgacattgtgcccatcaacatctctgggcagcagtttgataaacatgcaagtttgcgacactcgttgtttaacacagagacagccgtgaaccccaagtccaccctgaggcggaggcggaccattattggattctctaacttttcccagcgagaccaaggtcacagcaacagcccagcaggcagtgtggcccactctaccacctccgacatcaggcccagtcactcagttccagaaggggttcatggaagagttgcagttggtcaggatgctcggttcccaagtctcacctcgccagtactgagaactccttccagtgagccggacgaacctcaccaggcacggagtggcccaaaccctcctggcatggagagcatgggaatggtgtacagtgtccccagttcttgcaatggacctacagaatcaaccttctccacttcctggaagggagatgcttttacctacatgactccaagtgccaccagccagagcaatcaagtcaatgaaaatgggaaaaatccttcctgtgggaattcttgggtctctctaaacaaagtcccacctctggttcctaaggaggctgctaccctccttgtcgctcgtgataacccagcaggatgcagtgggtcagctggctaccctgagcgccttattcagcaaaggcacatgcccgaaagaccctccaagattggccttctgaccagtgggacctcgaggctggagacaggccccggtggggccagcagattccgggagcggtcactgtctgtgcccacagactcaggcaccacagatgtggactatgatgaggagcagaaggccaatgaggcctgtgccctgccttttgccagtacgagctctgagggcagtaacagtgctgacaacattgcctcccttagtgcccagcaagaggcccagcacagaaggcagaggtccaagagtatctcacttaggaaggccaaaaagaagccttccccacccacacgcagtgtctcactggtcaaagatgagccaggcctcttgcctgaaggtgggtcagcactacccaaggaccagaggcccaagagcctttgcctctccttggaacatcaaggacatcactcgtcccacccagatgctcagggtcacccagctattccaaaccacaaagatccagaaagtacacaattctcccaccactggtatcttactgactggaagtctggtgacacctaccaatccctgtccagctccagcactgccactggcaccacagtcattgagtgcacccaagttcagggcagctcagagtctcttgcctcaccttccacctccagagccactacaccttcccaactctccattgaagtggaggccagggagatatcatccccgggaaggccccctggactgatgtcaccctccagtggctactccagccagtcggaaacaccaacacccactgtttccatgtccctgaccctgggccacttaccccctccaagcagcagtgtccgggtacgtccagtggtacctgagaggaagtcatcactacccccgacgtcaccaatggagaaatttcccaagtcacggctatcatttgacctaccactgacctcttcacccaacctggatctgtctgggatgagtatctccatccgaagcaaaactaaggtgagtcggcaccactcagagacaaattttggcgtcaagctggcccagaaaactaatcccaaccagccaatcatgcctatggttactcagtccgacctacgttctgttcgcctgaggtcggtcagcaagtctgagccggaagatgatattgagagccctgagtatgccgaggaacccagagcagaagaagtcttcaccttgccagagagaaagacaaaacctcccgtagctgagaagcctccggtggcccggaggcctccaagcttggtccacaagccaccatctgttcctgaggagtatgcactaacttcaccaaccttggctatgccccccaggagctcaattcaacatgcgagaccactccctcaagacagctacacggtagtgcggaaaccaaagccctccagcttcccagatggcagaagcccaggggagtcaacagcaccctcatctcttgttttcacgccttttgccagttcctctgatgctttcttctcaggaacacagcagcctccccagggaagtgtagaggacgagggccccaaggtgagggttctgcctgaaagaattagcctccagagccaggaagaagctgagaaaaagaaaggcaagattccacctcccgtaccaaaaaaacccagcgtgctgtacctgcctctcacttctcccacagctcaaatggaggcctatgtggcagaaccaaggctgcctctcagccccatcatcaccctggaggaagacaccaagtgtcccgccaccggcgatgacctgcaatcacttggtcaaagggtgacttcaactcctcaggctgacagtgaaagggaggcaagccctctggggagttctgtggaaccaggcaccgaagaaaaaagtttaatcagtgataaaacagctgaatggattgcagaggatgatgatgacgtgtttgtggcttcacgcacaactgaagatttatttactgtgatacacaggtccaaaaggaagctgctcggctggaaggaacctggtgaggcctttgtgggtggcagaacgagttcccactcaccaataaagaacacagctgagtctccaatcagtgagtctaccgccactgcagggtcaggcagcagtgccaacctagatgctggcagaaatgacgatttcaaggccttgctacagaagaagggaagtaaggcaactccaaggtctcgtccctcagcagctgaacttctgaagaccactaacccactggctcggagaattattgcacaattttcaaaagactatgaaaccaccgataaccccagtacctaa

SEQ ID NO: 570 - DNA, 3950 bp, Artificial Sequence
  LRTM2
ggaggcgcaggatggaagatggaggtggtggtgaaaccgctttcctcctccctgtggtcggcagcgattcatccacaggcgcctttttccactgaaatgtgagcgtggccagggtgagcgctgccctcgcggccggccgtggtgcctctggtgtgcgcctgtgtgtgctgctgccgctgtcatcacagatgcaccccagctgtcactccccgctccactctggctcgctgctcgcgcacacgcgtgcgctctcctccctcgcccctttcttccctctctcctctctctctctccctccatccctctctttccttctcagtttgtgactgacccagcagccccgtcccccgtctgccacaagcagtccacctcctggtgctgtgtgctgcgtgccagccgctgctcccgctgagtggagactctggcaccagtgcccactgcgctctgcctgccggtggtgtctggatttctataggaatcccaggagggtcttactggagggttgagagccacctgattgaaggcgtttgcagtcagagtaaagacggctgccgcagcatgaacccctgagctgatgagtcttattatagcccggctggcggaagacagagtgctgctattcacctctgcgtgggcgtcggtggtgcagggggaagcagcaggccatccagcggctcacaccctacgcggctgcagctgccaagggcctggcccctgcctccctcgggccatggactgacaggcggcgcacccaggggctcctctctccccagagcgacagggcccggagagccgtgggcctcaccatgctggcgccgggcagcagccctgggcagaggggcaggctcgccctgcagtggaggcaagtctcctggatcacctgctggatcgccctgtatgctgtggaggccctccccacctgccctttctcctgcaagtgtgacagccgcagcctggaggtggactgcagtggccttggcctcaccacggtgcccccagacgtgcccgcagccacccgaaccctcttgctcttgaacaataagctgagtgccctgccaagctgggctttcgccaacctctccagcctgcagcggttggacctgtccaacaacttcctggaccggctgccccgctccattttcggggacctgacgaatctgactgagcttcagctgcgcaataacagcatcaggaccctggacagggacctgctgcggcactcgccgctgctccgccacctggacctgtccatcaacggcctggcccagttgccccctggtcttttcgacgggctcctggctctgcgctccctctcgcttcgctccaaccgtctgcagaatctggaccggctgacatttgaacccctagcaaacctgcagctgctgcaggtcggggataacccctgggagtgtgactgtaacctgcgtgagttcaaacactggatggagtggttctcctaccgagggggacgcttggaccagcttgcctgcaccctgcccaaggagctgagggggaaggacatgcggatggtccccatggagatgttcaactactgctcccagctggaggacgagaatagctcagctgggctggatattcctgggccaccctgcaccaaggccagtccagagcctgctaagcccaagcccggggctgagccggagccggagcccagcacagcctgcccacagaagcagaggcaccggccggcgagcgtgaggcgagccatgggcacggtgatcattgcaggggtcgtgtgcggcgtcgtctgcatcatgatggtggtggccgctgcctatggctgcatctacgcctccctcatggccaagtaccaccgggagctcaaaaagcgccagcccctgatgggggaccccgagggcgagcacgaggaccagaagcagatctcttctgtggcctgagcgcccatccccacccggccaggtaggaagggcggggagagcacacggcattgctcagccacagctcccaccttgacccggcgctggccactgcctccccgagtccaccctcctccccgccctccagcagacaagccacaccgggttctctccctgcactttcgaggctccctgaaagccaccgtgctgggggctcctgctgatgctcctgtctgggccagtaaatctttggaacatgtgggggatctccctaagctctggccacagcaaagcaaggaggtgtgtgcaagaggaggcttccggactgggcattcccctgtcgcccttcctgccctggggtggccatagctggtgactcttcctaccttgctggtcccacctcacctgcattgaggggacggggagggagggatctgagggatgaaggtagatttctgagactctctcctaagccagaaagacgttcttaacacccctgcagtgtgaaagctggtccagctctacaactgttggtaccaatgtgcaaacacaccagccctgccatctggacccagcactcagaaacaccatacacccctggccgacgccatcatgcccctggatctgctataggccacactgaccacatgctcctggattcgctaattcactcacacacccattgcatcaccagtgcggtcacatggattgaaagaattaatacacacacacacacacacacactcacacggtcacacggagaccgaggctatgagcgctcgaacagcagagacatgctcttccccaggggtctccctgagaccacagagcctctcgcgtgctcactgcaatcttctcaagtcaacagcaggaaggaactcaaccagtaacaccaggatcctttgagatcctctaaagtgggccaaagtggtgcccctggaggagccctcctgtcaccatggtaaccctctcacacctctcctgctgggctttcccgggataccacccaggggcctggagcggctgcatgtgtgcatggcggcctcctgaggacccagccacacaccactggtgttgcctcggtcctgcccacgcatctcacagcaccaggccctgtggggcccccactgattcctccacagcctgcagcctggcaccgtgactctgtgcctctcgccctccatcttcagtactcctggcctgtgacttcagggctgggacttggtggtgctttgccattggtggcaccctctggggaaagcaggtggcaggcagagaacacggtggctcccctgaggctcattgcctgccagcttattgcagacagagcccaggagcaggagcgggtggccacgtgctgcccagaggctcccaggatggggcctctgttcccgggctttgtctgctcagtgtggctccctagagcacccagccggggccaaaccagagagtgggtggggagcctgtctgggacagagccacctgctgccaaggcagtgcaagttttccaggttacctgtccccctccctagctctgcccctcctcagagtgtgaagatggtgggtacctaggtgtcatgctcacaggctcaggaggcatcaggctcgtccctggctctgggatggaatctcgatgggggctcaggaagaggccagcaagaaccctgaagccaagggtctgagcagagggagttggcaggcctagctcctgtgccccactccgaccctccctgctcatgcggcagtgggtgggtgaggtgggctgggggcctggaggagtgcctttgaggaggtcagtcctggcaggtggacagaggacgcctggcatgggctgcttactgggaccccaggcggccctggccatggccacagtcttccttcttttggcgtgtgggctggtaccagatctggggattttctaaagggactggggggaggggagggcattgtcaatggtggtatctttagcctgagacagaagatttttaaaggcaaaattatatttctggtttgttgtttcagaagaccaataaagactgtattttcctatgt

SEQ ID NO: 571 - DNA, 2910 bp, Artificial Sequence
  GABRA5
agaagcgcctaagagatgcgcatgtaaggggtgccatggagcacccgggaaggacccaggcctgggcagggaggcgttggggccggctctagggagcaaagctgtcggagtccaggcctctatcacccgactgctgacactgccctcccatccctgctctacaagcgggcggtggtgactacacgaggcgccgaagatgctgttgagggccctggagaaacttcagcagaacagggcctctccccttgcaggccgagccgggggccctgcgccctccccctccgcccagctcggccaagggcgcatttgctgagcgtctggcggcctctaccggagcacctctgcagagggccgatcctccagcccagagacgacatgtggcgctcgggcgagtgccttgcagagagaggagtagcttgctggctttgaacgcgtggcgtggcagatatttcagaaagcttcaagaacaagctggagaagggaagagttattcctccatattcacctgcttcaactactattcttattgggaatggacaatggaatgttctctggttttatcatgatcaaaaacctccttctcttttgtatttccatgaacttatccagtcactttggcttttcacagatgccaaccagttcagtgaaagatgagaccaatgacaacatcacgatatttaccaggatcttggatgggctcttggatggctacgacaacagacttcggcccgggctgggagagcgcatcactcaggtgaggaccgacatctacgtcaccagcttcggcccggtgtccgacacggaaatggagtacaccatagacgtgtttttccgacaaagctggaaagatgaaaggcttcggtttaaggggcccatgcagcgcctccctctcaacaacctccttgccagcaagatctggaccccagacacgttcttccacaacgggaagaagtccatcgctcacaacatgaccacgcccaacaagctgctgcggctggaggacgacggcaccctgctctacaccatgcgcttgaccatctctgcagagtgccccatgcagcttgaggacttcccgatggatgcgcacgcttgccctctgaaatttggcagctatgcgtaccctaattctgaagtcgtttacgtctggaccaacggctccaccaagtcggtggtggtggcggaagatggctccagactgaaccagtaccacctgatggggcagacggtgggcactgagaacatcagcaccagcacaggcgaatacacaatcatgacagctcacttccacctgaaaaggaagattggctactttgtcatccagacctaccttccctgcataatgaccgtgatcttatcacaggtgtccttttggctgaaccgggaatcagtcccagccaggacagtttttggggtcaccacggtgctgaccatgacgaccctcagcatcagcgccaggaactctctgcccaaagtggcctacgccaccgccatggactggttcatagccgtgtgctatgccttcgtcttctcggcgctgatagagtttgccacggtcaattactttaccaagagaggctgggcctgggatggcaaaaaagccttggaagcagccaagatcaagaaaaagcgtgaagtcatactaaataagtcaacaaacgcttttacaactgggaagatgtctcaccccccaaacattccgaaggaacagaccccagcagggacgtcgaatacaacctcagtctcagtaaaaccctctgaagagaagacttctgaaagcaaaaagacttacaacagtatcagcaaaattgacaaaatgtcccgaatcgtattcccagtcttgttcggcactttcaacttagtttactgggcaacgtatttgaatagggagccggtgataaaaggagccgcctctccaaaataaccggccacactcccaaactccaagacagccatacttccagcgaaatggtaccaaggagaggtcttgctcacagggactctccatatgtgagcactatctttcaggaaatttttgcatgtttaataatatgtacaaataatattgccttgatgtttctatatgtaacttcagatgtttccaagatgtcccattgataattcgagcaaacaactttctggaaaaacaggatacgatgactgacactcagatgcccagtatcatacgttgatagtttacaaacaagatacgtatatttttaactgcttcaagtgttacctaacaatgttttttatacttcaaatgtcatttcatacaaattttcccagtgaataaatattttaggaaactctccatgattattagttgaccaactatattgcgagaaacagagatcataaagagcacgttttccattatgaggaaacttggacatttatgtacaaaatgaattgcctttgataattcttactgttctgaaattaggaaagtactgcatgatcttacacgaagaaatagaataggcaaacttttatgcaggcagattaataacagaaatacatcatatgttagatacacaaaatatttccctgaggaaaaaaaatcaactgcttaaattttttgggaagaaaaagaaacatttcttaccccacaccacccactacctgaacaatagccaagaaaggaaaggagatgttaaaacaaacagtgttttgatgacattctcagcacttggcccatgtgatcgctgtctctgaaacactgaccacctctccctacagccagcgtgtagtgcttcagtggtgagaaattgtaattgagttattttccattttatttccttgtatgtatttcatgactggacttactgctctgtcagcttttgtatatgaatcttaaatgttcattaaaaaataaaaaatgaactgatcttgtggacaaaaaaaaaaaaa

SEQ ID NO: 572 - DNA, 3284 bp, Artificial Sequence
  RRM2
cccgtgcaccctgtcccagccgtcctgtcctggctgctcgctctgcttcgctgcgcctccactatgctctccctccgtgtcccgctcgcgcccatcacggacccgcagcagctgcagctctcgccgctgaaggggctcagcttggtcgacaaggagaacacgccgccggccctgagcgggacccgcgtcctggccagcaagaccgcgaggaggatcttccaggagcccacggagccgaaaactaaagcagctgcccccggcgtggaggatgagccgctgctgagagaaaacccccgccgctttgtcatcttccccatcgagtaccatgatatctggcagatgtataagaaggcagaggcttccttttggaccgccgaggaggtggacctctccaaggacattcagcactgggaatccctgaaacccgaggagagatattttatatcccatgttctggctttctttgcagcaagcgatggcatagtaaatgaaaacttggtggagcgatttagccaagaagttcagattacagaagcccgctgtttctatggcttccaaattgccatggaaaacatacattctgaaatgtatagtcttcttattgacacttacataaaagatcccaaagaaagggaatttctcttcaatgccattgaaacgatgccttgtgtcaagaagaaggcagactgggccttgcgctggattggggacaaagaggctacctatggtgaacgtgttgtagcctttgctgcagtggaaggcattttcttttccggttcttttgcgtcgatattctggctcaagaaacgaggactgatgcctggcctcacattttctaatgaacttattagcagagatgagggtttacactgtgattttgcttgcctgatgttcaaacacctggtacacaaaccatcggaggagagagtaagagaaataattatcaatgctgttcggatagaacaggagttcctcactgaggccttgcctgtgaagctcattgggatgaattgcactctaatgaagcaatacattgagtttgtggcagacagacttatgctggaactgggttttagcaaggttttcagagtagagaacccatttgactttatggagaatatttcactggaaggaaagactaacttctttgagaagagagtaggcgagtatcagaggatgggagtgatgtcaagtccaacagagaattcttttaccttggatgctgacttctaaatgaactgaagatgtgcccttacttggctgattttttttttccatctcataagaaaaatcagctgaagtgttaccaactagccacaccatgaattgtccgtaatgttcattaacagcatctttaaaactgtgtagctacctcacaaccagtcctgtctgtttatagtgctggtagtatcaccttttgccagaaggcctggctggctgtgacttaccatagcagtgacaatggcagtcttggctttaaagtgaggggtgaccctttagtgagcttagcacagcgggattaaacagtcctttaaccagcacagccagttaaaagatgcagcctcactgcttcaacgcagattttaatgtttacttaaatataaacctggcactttacaaacaaataaacattgtttgtactcacaaggcgataatagcttgatttatttggtttctacaccaaatacattctcctgaccactaatgggagccaattcacaattcactaagtgactaaagtaagttaaacttgtgtagactaagcatgtaatttttaagttttattttaatgaattaaaatatttgttaaccaactttaaagtcagtcctgtgtatacctagatattagtcagttggtgccagatagaagacaggttgtgtttttatcctgtggcttgtgtagtgtcctgggattctctgccccctctgagtagagtgttgtgggataaaggaatctctcagggcaaggagcttcttaagttaaatcactagaaatttaggggtgatctgggccttcatatgtgtgagaagccgtttcattttatttctcactgtattttcctcaacgtctggttgatgagaaaaaattcttgaagagttttcatatgtgggagctaaggtagtattgtaaaatttcaagtcatccttaaacaaaatgatccacctaagatcttgcccctgttaagtggtgaaatcaactagaggtggttcctacaagttgttcattctagttttgtttggtgtaagtaggttgtgtgagttaattcatttatatttactatgtctgttaaatcagaaattttttattatctatgttcttctagattttacctgtagttcatacttcagtcacccagtgtcttattctggcattgtctaaatctgagcattgtctagggggatcttaaactttagtaggaaaccatgagctgttaatacagtttccattcaaatattaatttcagaatgaaacataatttttttttttttttttgagatggagtctcgctctgttgcccaggctggagtgcagtggcgcgattttggctcactgtaacctccatctcctgggttcaagcaattctcctgtctcagcctccctagtagctgggactgcaggtatgtgctaccacacctggctaatttttgtatttttagtagagatggagtttcaccatattggtcaggctggtcttgaactcctgacctcaggtgatccacccacctcggcctcccaaagtgctgggattgcaggcgtgataaacaaatattcttaatagggctactttgaattaatctgcctttatgtttgggagaagaaagctgagacattgcatgaaagatgatgagagataaatgttgatcttttggccccatttgttaattgtattcagtatttgaacgtcgtcctgtttattgttagttttcttcatcatttattgtatagacaatttttaaatctctgtaatatgatacattttcctatcttttaagttattgttacctaaagttaatccagattatatggtccttatatgtgtacaacattaaaatgaaaggctttgtcttgcattgtgaggtacaggcggaagttggaatcaggttttaggattctgtctctcattagctgaataatgtgaggattaacttctgccagctcagaccatttcctaatcagttgaaagggaaacaagtatttcagtctcaaaattgaataatgcacaagtcttaagtgattaaaataaaactgttcttatgtcagtttcaaaaaaaaaaaaaaaaaa

SEQ ID NO: 573 - DNA, 3010 bp, Artificial Sequence
  EVI2A
agagaagttggagctttttcgttgtttttttttttttccctcctgtgacatgtgctttagttgcagtggaaaggaaatgtgtcatctgtggtttggttttaaaagtggaaaactagctgcacatatccttttttactgcagatttactttaaggctcatattctccaagtctattctgctttaaaaagaagacaagaaaagaagtggtttatcaaaatcacgttataatcagattttgaccaagcattttgtaagtatacaaatgtcagccaatgacatataacaaccatttcttataaaaccttgatgttcaaaagcctgactagcagtggcatccatgttgcttaggagttggtttggaaacaaagactttcaggccctacctatactagctagattgccaagcatgcccacggacatggaacacacaggacattacctacatcttgcctttctgatgacaacagttttttctttgtctcctggaacaaaagcaaactatacccgtctgtgggctaacagtacttcttcctgggattcagttattcaaaacaagacaggcagaaaccaaaatgaaaacattaacacaaaccctataactcctgaagtagattataaaggtaattctacaaacatgcctgaaacatctcacatcgtagctttaacttctaaatctgaacaggagctttatataccttctgtcgtcagcaacagtccttcaacagtacagagcattgaaaacacaagcaaaagtcatggtgaaattttcaaaaaggatgtctgtgcggaaaacaacaacaacatggctatgctaatttgcttaattataattgcagtgctttttcttatctgtacctttctatttctatcaactgtggttttggcaaacaaagtctcttctctcagacgatcaaaacaagtaggcaagcgtcagcctagaagcaatggcgattttctggcaagcggtctatggcccgctgaatcagacacttggaaaagaacaaaacagctcacaggacccaacctagtgatgcaatctactggagtgctcacagctacaagggaaagaaaagatgaagaaggaactgaaaaacttactaacaaacagataggttagtgaagaaaaatgcaaagtagcaatgagaaggcttatggagtaaaaatgaagtcagttggtatttaatcccaaagtgttgttctgattatctaaaatttgacatggtagaccttgcaatttagaatcaagcaggtgagacagggagaagtatgcctgcttaattatttaaactgtgtacttttgttttgacactgaatattttaaaaagcaaataataaaataactaagcatttgaggaaaattttaaggataaattgaggaaactgattaatagagatagcaagggataattaaataaatattccctatgtagcaacagtggttagatgatctttgtctgaatgtaattaaactttgaatagttttagtgtgtccttaaagccaagtatatgctttaacatcaaatggaagtcaaattcctaatgcatagatagagagagctaaactgtgtaatttaatggtatcttccttgctggatgtggcagaatccacaccagcttatcaaccaacacagctaattttagaatagatcctttatctttccatatggcacacgtaagaaagtgtttttctactattaatattaaattaaaacctttacttttgtataataaattaaaactcagaataaacctgtgaccacgtatatttgcattcactttattactttagagaacacattgtaaagatcaataagaaatagagcacaactaaaataaataagatttatagccacaccaataggctaagtgtaaacgcaaagtatgtttcactgtttatgattaataatattcatcttttctataaatactacttactggaacattaacaacaagtaccaaaggttgattaatttttggacttcaaggatgccaagtagcctaatgatttattaggggtgtgtgtgtgtgtgtgtgtgtgtgtgtgtgtgtgttcaaatctggaaaactgcatacttcaggttataatttaacctttaaagaaactggcttcaagtaaaataatgacttacatttaagttgagaacccccccatcttcaattaaatatattacaaaaattggtttgagagactttccaaatatctactgaaattaacacagggctaagatcaggccacatttcaaaaatctcatcccttactgggcatttatttcgggcaatatagtaaccattttaaaaatattttttatatgttttttcccaagtatgactacaatcttactctcccttctaagctagtgattcttaccctggctgcatgtcagaatcacctgaagagtttttaaaaaacaccaatgcctaattcccatgtcttccttctgatgcaactggaatggggtgaactctaagcattggtaatttttacgtaactctcaaggtgataactgctcttggtcatcaaattcaaacgtctagctattattaaaatgagaggaaaaaaataaagcatcatttttattatcaatttattagcaatttgtaaaaaacaaatctattctctaaacgagaaatcataacaatattattccagataaagttaagtgttaacaaagtaaaaaggaaagcatgagaatattcatgccagtcatggtgactgaaatcaggttatcttttgaggggaaaaataacccagattagaaatgaaactgggcagacttcccattctgtgcaaaaattgaaaatttgagattgtgcaccagtacatccaggagtaacacaaagcactccttgaatcaagggtcataaataaacacgtgtcagagaaaattaaaagaaattaatatcatcataaaaataggaaattactttcatattcaacatactggtcaaacattttctcaccagagagcttctaccacaaggatatttaaaagaatatttaaaattcacc

SEQ ID NO: 574 - DNA, 2101 bp, Artificial Sequence
  MOG
gtcatcccctcagtctgtagcccttttgtgtgagtgcctggcaagggtgacgtggggctgtttctgcgggcacagctgcagcaattaccggagtggaggcagggcccaggcagcactgccctccaagatcttcccttgggcttttcagcagtaaggggacatgcaccccaagggcctccacttggcctgaccttgctgcgggggctctctgtccccaggaacagtagagatggcaagcttatcaagaccctctctgcccagctgcctctgctccttcctcctcctcctcctcctccaagtgtcttccagctatgcagggcagttcagagtgataggaccaagacaccctatccgggctctggtcggggatgaagtggaattgccatgtcgcatatctcctgggaagaacgctacaggcatggaggtggggtggtaccgcccccccttctctagggtggttcatctctacagaaatggcaaggaccaagatggagaccaggcacctgaatatcggggccggacagagctgctgaaagatgctattggtgagggaaaggtgactctcaggatccggaatgtaaggttctcagatgaaggaggtttcacctgcttcttccgagatcattcttaccaagaggaggcagcaatggaattgaaagtagaagatcctttctactgggtgagccctggagtgctggttctcctcgcggtgctgcctgtgctcctcctgcagatcactgttggcctcatcttcctctgcctgcagtacagactgagaggaaaacttcgagcagagatagagaatctccaccggacttttgagtcctttggtgttctaggaccccaggttaaggaaccaaaaaagacagggcaattccttgaagagctacgaaatcccttctgagtgatgtcacatcttggcaggggtggaggagagcctggttgcccagggatttgtccttggggacatctcatccatcaagttgcacactcactggcatctttgctatggggacattccaatttgcactttcaggaacactctgaattccaagtagaattgatttcccttcttctgtcatctaccttttctcttcattttcccatttttattacccttctttccatttctctctccagtcttccacctggaagccctctctggctaaggacaggcaggtgcccctctctccatcagaggacacctgtactggagagcaacacaggatggtctctgccatgaactggaggccaggaatctcctcactgaaaattacagtatggtaactttgcaaatggtggttgtttcttccaagactccagccctgattgcgcaaaactgaaaggcatgtgaagggaaggaagaggaagagtgcaaaacattgaagagagagctgagtgagctgaagagtgaggatatgagtagccccaacccaaacctggagatggggagaaacctacagaatactagccagagctcctccttgtcttggcagcctactagggacctggggaagcaaaaacgaaagctgggcaacatgcctgctttagaatgttttccttctacttacacatcttccacaggtctcagaatctttccttcctctcatccttttctcctatcttcatatctatcagagtatccactgtttattcaacaactactacttgatggtcagacacaaacaaacaagctaggtgctaattaataaagatacgagttttggccgggtgcggtggctcacgcctgtaatcccagcactttgggaggccgaggcgggcgaatcacgaggtcaggagttcaagaccagcctggccaacatggtgaaaccccatctctactaaaaatacaaacaattaactgagcatagtggtgggcacctataataccagctactccggaggctgaggcaggagaatcgcttgaacccaggaggcagaggttgcagtgagctgagatcgtgccactgcactctagccggagtgacagagtaagactctgtctcaaaaataaataaataaataaataaataaataaataaataaataaataaaaaataataatacaagttttcataagcacacttctaaaaaaaaaaaa

SEQ ID NO: 575 - DNA, 2426 bp, Artificial Sequence
  AMPD1
acttagcagagaagaatcaaatttccgggggcaaagcaaaataataaaatgaatgtcaggatattttatagtgtcagtcagtcaccccacagtctcctctctcttcttttctactgtgctatcctagaatcaaggatttcagcaacaatgcctctgttcaaactcccagctgaagagaaacaaattgatgatgcaatgcgcaactttgctgaaaaagtgtttgcctctgaagtcaaagatgaaggaggtcgtcaggagatttccccctttgatgtggatgagatctgtccgatttctcatcatgagatgcaagcacacatattccatctggagactctgtccacctccacagaagccaggagaaaaaagcgtttccaaggacggaagactgttaatttgtccattccactaagtgaaacatcttccaccaaactgtcccacattgatgaatacatttcctcatctccaacctaccagaccgtgcctgattttcagagagtgcagattactggtgactatgcctctggggttacagttgaagattttgaaattgtttgcaaaggtctgtatcgggcactatgcatacgtgagaaatacatgcagaagtcgtttcagaggttccctaaaaccccttccaaatacttgcggaacattgatggtgaggcttgggtagcaaatgagagcttctatccagtctttactcctcctgtgaagaagggagaggaccccttccgaacagacaaccttcctgaaaacctgggctatcacctcaaaatgaaggacggtgtagtttacgtctatcctaatgaagcagcagtcagcaaagatgagcctaagccacttccttacccaaatctggacaccttcttagacgatatgaattttttacttgctttaattgctcaaggacctgttaagacctatacccaccggcgcctgaagttcctctcctccaagttccaggtccatcagatgcttaacgagatggacgagttaaaggagctgaaaaacaacccccaccgagatttttataactgcaggaaggtggacacccatatccatgcagccgcttgcatgaaccagaaacatctgctgcgttttattaagaaatcttaccaaattgatgctgacagagtggtctatagcaccaaagagaagaatctgaccctaaaggaactttttgctaaattaaaaatgcatccttatgacctgactgttgattctctggatgttcatgctggacgccagaccttccagcgttttgataagttcaatgacaaatataatcctgtaggagcaagtgagctacgggacctctacttgaagacagacaattacattaatggggaatattttgccactatcatcaaggaggtaggtgcggacctggtggaggccaagtaccagcatgctgagccccgcctgtccatctatggccgcagtcctgatgagtggagcaaactctcctcctggttcgtctgcaatcgcatccactgccccaacatgacatggatgatccaggttcccaggatctatgatgtgttccgttccaagaatttccttccacattttggaaaaatgctggagaatattttcatgccagtgtttgaggccaccatcaacccccaggctgacccagaactcagtgtcttcctcaagcatatcactggctttgacagtgtggatgatgagtccaaacacagtggccacatgttctcctccaagagtcccaagccccaggagtggacattggaaaagaatccatcttacacttactatgcctactacatgtatgcaaacatcatggtgctcaacagcctgagaaaggaacgaggcatgaatacgtttctgttccgacctcactgtggagaagctggagccctcacccatctcatgacagcattcatgatagcagatgatatctctcatggcctaaatttaaaaaagagtcccgtgctacagtacttgtttttcttagcccaaattcccatcgccatgtcaccactaagtaacaatagcctatttctagagtatgccaaaaatccttttttggatttccttcagaaagggctaatgatctcactgtctacagatgacccaatgcaattccactttaccaaggagcccctaatggaagaatatgctattgctgcacaagtcttcaagctgagcacctgtgatatgtgcgaagtggcaaggaacagtgtcttgcagtgtggaatttctcatgaggagaaagtaaagtttctgggcgacaattaccttgaggaaggccctgctggaaatgatatccggaggacaaatgtagcccaaatccgcatggcctatcgctatgaaacctggtgttatgaactcaatttaattgctgagggtcttaaatcaacagaataaaaaaaagtaaaccaaaaaaaaaaaaaaaaaaaaaa

SEQ ID NO: 576 - DNA, 6651 bp, Artificial Sequence
  SAR1B
gccggcccggaaggggctgatgcgaactggggccacggcagccatcgcgctttgcagttcggtctcctggtgtacggccaacgccaagtaggggattgcgttccctccagtcgcagagtttccctcttgtcgcccaggctggagtgaagtggcacgatctcggcttactgcaagctccgcctcccgggttcacgccattctcctgcctcagcctcccgagtagctgggactacagaccctatcagatttggatatgtccttcatatttgattggatttacagtggtttcagcagtgtgctacagtttttaggattatataagaaaactggtaaactggtatttcttggattggataatgcaggaaaaacaacattgctacacatgctaaaagatgacagacttggacaacatgtcccaacattacatcccacttccgaagaactgaccattgctggcatgacgtttacaacttttgatctgggtggacatgttcaagctcgaagagtgtggaaaaactaccttcctgctatcaatggcattgtatttctggtggattgtgcagaccacgaaaggctgttagagtcaaaagaagaacttgattcactaatgacagatgaaaccattgctaatgtgcctatactgattcttgggaataagatcgacagacctgaagccatcagtgaagagaggttgcgagagatgtttggtttatatggtcagacaacaggaaaggggagtatatctctgaaagaactgaatgcccgacccttagaagttttcatgtgtagtgtgctcaaaagacaaggttacggagaaggcttccgctggatggcacagtacattgattaacacaaactcacattggttccaggtctcaacgttcaggcttactcagagatttgattgctcaacatgcataacttgaattcaatagacttttgctggttataaaacagatgttttttagattattaatattaaatcaacttaatttgaatgagaattgaaaactgattcaagtaagtttgagtatcacaatgttagctttctaattccataaaagtacttggtttttacagtttataatctgacatcaccccagcgccatttgtaaagagcaactttccagcagtacatttgaagcactttttaacaacatgaaactataaaccatatttaaaagctcatcatgttaaattttttatgtacttttctggaactagtttttaaattttagattatatgtccacctatcttaagtgtacagttaataattagcttattcaatgattgcatgatgccttacagttttcaataactttttttcttatgcaaacgtcatgcaataaaacaaactctaatgtttggcatccttgttgggcaaatgtttcatttaaatgtgtcttatctagctagtatactctgaaaatttgagtatttaatattaggcatatgaagtggttgttgggaaaggagattccttcagaatatttagaatagcgtttaaggctctcaaggcttaggtatttaccatgagatggttgtggtcagttgcacctgataccatgtatccctgaatcatgtgtatttttattagtaatgcagccactaccattgctgatggggtctgtgtcctagtccctgtgggattggccttctgaagaaaagcacatttatggtacacaaggttgattctcagtttggtaggctctatagttccatcccagctgtctaattctgaagtgctccagtcttattggtgcccaatggggtaatctgtgcctcttccccaaaagcaatgacaggcaccagtgtctccacatttagatatattcccagtctctgtacatttaacagtactctctggggcaagcaataagtaggaccttgtgtgcagtttcattgtagagacatgtatatctgaggaataaaacagcttgttctgtgtcagtctgagatatgtggagattttgttcctatcctatagctcttttgtattctttggcatattttatatcctggtagaagaaaacaagtgcttgtttccaattttcttttttcttatttgctctcaggtagttcttactccatacaacaaagactttttgtttgttgggctttttttttttttttttttttgctctgtttcattttgttttagagacggggtttcaccatgttgtccaggctggtctcaaactcctgacctcaagtgatctgcccgccttggcctcccaaagttctgggattataggcgtgagctaccatgcctgacctgacttttgtttttagatattatgcttgccatgtgatagggcctgcaagcctcattgctaggcttactaagaaaattttagtttttcaaaagcattataatttcctaagaaactgaattctttttttatatgtttgagattcccatcattagtaatataagatgaaaggtaagtgccaaaaatgtatttttaaagaccctcaagtttaagatttatcctgattataagccaagttttatagtatatttaaccaattccatcaagaataattttaatatcaaaaattagtgttttctgtagccattgtccatgtcagagttacagtcctttttgtcattgataatataacctatgaagcagataaggattgaggaatatgactggaaggaattactatttagctaagctgacaaggtcgcttcttaagatgacatttggtttcagtaatctgactattctgttttcactttcatcttctttctaaatgaaaacaaaagtgctccctcccttcctggaaacctcagtaacactatgggaaaagtagaacatgacattgcagcctattgatttcttcttccagataggtttaaagtactccttaagttctgactaaatagaactaagccttattaaaaataactgcctcttgttcatgttatctgtaccttcagggacctgcctttcttcaagtatttcctagagtatctattatgatactgaagaagctaattatttgtgttgtaaatgggtataaatgaaaaaaaaacatactggtttctctagccaggaaaaatgctttctggtgtaatatatcttgctccagaaccctcattctaattgtaacactaggatcaaagaaacaaagtcactttgtggaccacagctaaactgtggatattttcccaaagacataagatttttatggcccgagcctctagaaaggaagccatgtttaggagcaaccagctttcctcccagctttagggggcagagttcctgagccagaggacttactgtccagctttgagaacctctccagagtatatgcactgggtactgctctttttcaagagaaccaaattaagaggatggcaagaaacagtagaagcacagaggaaagacaactctgcatgtgcctgtgtgaatgtgtgcatccatggagtatttcccaggtaaatactagtactggggacataggctaattgtgtgtcccacactgcaagatgctagggcgtagttaacactgtggtatacatacaaatcaggcactgtccaaaagattttttaaaatctaaagtctgaaatgtaaaaatataaggtctcaacccacttttacacttttaaagagatcccatacctgtttcactgactgccgttaattacacttttggatcacagctggttaaattgatagatttcagtttatctcagtgaatttttagaatggagattatagcattttttaattggagaacagacatttcctaaagtatatgaaaaaaaattattcactgttggtttaaaccagtatctttgtatgagtgccaaagatatatgaacacagatactgcctgtgcagacctaaattttagttttgtgtacctggatccatatacaaattttttgtggtttatagcataaaagcagaacgttgtttctttcttagttttcaaccggctcatcttttgtttttgttttttgtttttttgttttttgttttttttgagatggagtcttgctttgttgcccaggctagagtgcagtggcacaatctctgcttactgcaacctccacctccggggttcaagtgattctcctgcctcagcctcctgagtagctgggactacaggcgcgcaccaccatgcccggctaatttttgtatttttagtagagatggggtttcactatgttggccaggctggtctcgaactcctgacctcgtgatctgcccacctcagcctcccaaagtgctgggattacaggcgtgagccgccatgcccggccaattttcaactggcccatactttatagtgatggaaagcgcataaactacttgtaaatcattaaaatagggtgataactgtgataatagtgtttcttgcattctagaaaattattttattaactacattcaaaacccagcatttcacaggttccatcattagaaacagtatagttctagttaacatgattggagagtttcaggggaaaggtttacattttctgaaactgtatttggtatgtgactcaatgtggtatttcagtcttgttagtcacttacatgactgacgtttgcaaggatttattgccaagtaaaatttgaccagagtgcactgagaatagctacataaggggaaatctctcaaaattccttctgttcatttaatttggagcatattgtttaaatcattttaaacatatgtaaaaagttgaagcattaaaaaatcttcaagaaacaatgaaaaaatagaaattagcaaacataagtttcttaatgcaaaattaatagtgaataaaatatagcctacattaaaagccagaggctttgctataaatataagagtttagaaaaacagtgtgcttcaattaaggactaaattatcaaaactgcatgtttgttttttcttttcttttcttttttttttgagatgaagtctcactctgttgcccaggctggagtgcagtggtgcgatcttggctcactgcaacctctgcttcccaggttcaagcgattctcgtgcctcaccatcccgagtagctgggattacaggtgcaccacaccatgcccagttaatttttgtatttttagtagagacagggtttcattatttggccaggctggtctcgagctcctgatcttaagtgatccactcgcctcggcctcccaaagtgctgggattatacacatgagccactgtgcccagcctaaaactacatgttgaagcttccggtcatttccattattatccttcttttgaaattcaagttagtgctttttaaccaaataaaagaagaaccagctcttgggatatgtgactctgcctctgtataaagtgactggaattttgttaaaaccgtgtttccacttctgaaccctgttaccattccccctcacaaatccccacccaacacctggattttaaagatcctccagtgtcaagggaagccacagagtctattaaagaggcagttctgaaccaattaatttttgtccttataatttagagcattaaatagctaatatatttaatggcactaattgttgttcacggctttcatcatacttttaaacagaatccaaagtattcaaaggaaagtaagcgaagttatccaaagccaactttgtttcaggtgtgtcccctgccccaaatagattttagggcagaaatagaaaactgagtttacacagaactatttttggaaaagctgcactggagtagatggattcttcttcagcatacttttttgtttgtttgtttgagatggagtcttgctttgtcacccaggctggagtgcagtggtgtgatctccactcactgcaacctccacctcccagcttcaagtgattctcctgcctcaaccttccaagtagcttggattacaggcgtgcgccaccacagctggctaatatttgtattgttagtagagacagggtttcaccatgttgtccaggcttgtcgaacttctgacctcacgtgatccacctgcctcagcctcccaaagtgctagattataggcgtgaaccactgcgcccggccagcatgcattttaaaagtggcttagatttagttttaaatattttggggtgaaaggcaggaacagttctgtttttgacatacaggttttctttgggattgttttcattttcaagtatagattcatgtcagaatggccaacttaacgtgggtttctgtattccctggtgttgctcttaacctgaactcataatcagttgccatactgaggcaagagcactcagggtgaacatagtcaagttactttaaaagtgataaaagtgtttttccatggtgaaaccttcagtatttggctgaatgtaaagtatgttgaagtggtatattgatggtaagttgttaatcactaaccttgtttgcacttttgtacaccactgcttgcactaggatcttggtgtgaattttcaattgttttacagtgtatacagattattaaggataatttatataaagatgtttctgtttaactttgtgtgttttacaacaaagagctataatagatggttaaacgtttttgaattgtgtttatatgttagtttgattatgttctattatcttttcacctgccatgaatttgagtgttaggaagggaaaaataaaatactaatctggtcttgaagaa

SEQ ID NO: 577 - DNA, 1841 bp, Artificial Sequence
  TFG
tggtcacgccccgcgcatgcgtgcatcggggcagctcacgcttcctaaatcccgtcatccagtgagaaagcagggactcttcggcctaggcagccgggacccagccagccctgcgcctcgcgccgtcgcgcatgcgtcctggtctttctctagagttgtatatatagaacatcctggagtccaccatgaacggacagttggatctaagtgggaagctaatcatcaaagctcaacttggggaggatattcggcgaattcctattcataatgaagatattacttatgatgaattagtgctaatgatgcaacgagttttcagaggaaaacttctgagtaatgatgaagtaacaataaagtataaagatgaagatggagatcttataacaatttttgatagttctgacctttcctttgcaattcagtgcagtaggatactgaaactgacattatttgttaatggccagccaagaccccttgaatcaagtcaggtgaaatatctccgtcgagaactgatagaacttcgaaataaagtgaatcgtttattggatagcttggaaccacctggagaaccaggaccttccaccaatattcctgaaaatgatactgtggatggtagggaagaaaagtctgcttctgattcttctggaaaacagtctactcaggttatggcagcaagtatgtctgcttttgatcctttaaaaaaccaagatgaaatcaataaaaatgttatgtcagcgtttggcttaacagatgatcaggtttcagggccacccagtgctcctgcagaagatcgttcaggaacacccgacagcattgcttcctcctcctcagcagctcacccaccaggcgttcagccacagcagccaccatatacaggagctcagactcaagcaggtcagattgaaggtcagatgtaccaacagtaccagcaacaggccggctatggtgcacagcagccgcaggctccacctcagcagcctcaacagtatggtattcagtattcagcaagctatagtcagcagactggacctcaacaacctcagcagttccagggatatggccagcaaccaacttcccaggcaccagctcctgccttttctggtcagcctcaacaactgcctgctcagccgccacagcagtaccaggcgagcaattatcctgcacaaacttacactgcccaaacttctcagcctactaattatactgtggctcctgcctctcaacctggaatggctccaagccaacctggggcctatcaaccaagaccaggttttacttcacttcctggaagtaccatgacccctcctccaagtgggcctaatccttatgcgcgtaaccgtcctccctttggtcagggctatacccaacctggacctggttatcgataaggaggctcctctacaccaattaatgtagctgctagctattggcctcccaaaagactccagtactattttaatttgtattgaagaagttcagaaatttaaaagcagagcattttttatgatatcattgttggtgttaattgaaagtataatttgctggaacacaaagaccaaaatgaaagttttttcctccctgcttaaaaatgtagcagcttcttagttactttggaacactactcttacatgtataaagtgattgacttgactttctagcttcccttgtccggaggatattaaaatgctagggtgaggtttagccatcttacttggctttttactattaacatgatgtactaaagtagagccctttgagaatacaagatattatgtataaaatgtaacactgatgataggttaataaagatgattgaatccattaaaaaaaaaaaaaaaaaa

SEQ ID NO: 578 - DNA, 1875 bp, Artificial Sequence
  TTYH1
ctgcctcccccccgctcccgctcccctgagcccagccagaccccgcgccgcccgcgccccgctcgactccggaggctcccgcagccccggcgtccgccccgctgccccctcccccgggggccatgggggcgcccccgggctaccggccctcagcttgggtgcatctcctccaccagctgccccgcgccgacttccagctccgcccggtgcccagcgttttcgcgccccaagagcaggaataccagcaggccttgttgctggtggcggccttggcgggcctgggcttgggcctgagcctcattttcatcgctgtctacctcatccgcttctgctgctgccggccccccgagccccccgggtccaagatcccctcgcccgggggaggctgcgtcacctggagctgcattgtcgcccttctcgccggctgcactggcattggcatcggtttctatggcaacagtgagaccagtgatggggtgtcccagctcagctctgcgctgctgcacgccaaccacacactcagcaccattgaccacctggtgttggagacggtggagaggctgggcgaggcggtgaggacagagctgaccaccctggaggaggtgctcgagccgcgcacggagctggtggctgccgcccgaggggctcgacggcaggcggaggctgcggcccagcagctgcaggggctggccttctggcagggagtgcccctgagccccctgcaggtggctgaaaatgtgtcctttgtggaggagtacaggtggctggcctacgtcctcctgctgctcctggagctgctggtctgcctcttcaccctcctgggcctggcgaagcagagcaagtggctggtgatcgtgatgacagtcatgagtctcctggttctcgtcctgagctggggctccatgggcctggaggcagccacggccgtgggcctcagtgacttctgctccaatccagacccttatgttctgaacctgacccaggaggagacagggctcagctcagacatcctgagctattatctcctctgcaaccgggccgtctccaaccccttccaacagaggctgactctgtcccagcgagctctggccaacatccactcccagctgctgggcctggagcgagaagctgtgcctcagttcccttcagcgcagaagcctctgctgtccttggaggagactctgaatgtgacagaaggaaatttccaccagttggtggcactgctacactgccgcagcctgcacaaggactatggtgcagccctgcggggcctgtgcgaagacgccctggaaggcctgctcttcctgctactcttctccctgctgtctgcaggagcgctggccactgccctctgcagcctgccccgagcctgggccctcttcccacccaggaatccaagcgctttgtgcagtggcagtcgtctatctgagcccctcctcccggctggactggagcctggctcccctcttcgttccttccctggctgccggaggagaccccactaacccagcctgcctgggctctgaccactaacactcttggccatggacagcctgcacaggaccgcctccctgctcttggccactgtgctcccatttctgtccttggccttgggagtagctgagggggcagactagggagtagggctggcaggggagggggcagacagcctcgcctcgcacccttcatccctggctgccggtcccatccttggagggactaagctgggggtgggggacatgagtccccctgctgcccctgccacatcccagtgggctctgaccccctgatctcaactcgtggcactaacttggaaaagggttgatttaaaataaaagggaagactattttacaagcaaaaaaaaaaaaaaaaaa

SEQ ID NO: 579 - DNA, 2024 bp, Artificial Sequence
  GC
atattaagtaaactttagtgaggaacagcagtggaaaataatctatataccttggctcttttgcagtttgacaaagttaatgattaaaatctcctagattttccactacagtatccccagggtgtctatttaccttgattgatattattttatctcttttgggccaaagataacagccccttgcttctgtgtttaataataattctgtgttgcttctgagattaataattgattaattcatagtcaggaatctttgtaaaaaggaaaccaattacttttggctaccacttttacatggtcacctacaggagagaggaggtgctgcaagactctctggtagaaaaatgaagagggtcctggtactactgcttgctgtggcatttggacatgctttagagagaggccgggattatgaaaagaataaagtctgcaaggaattctcccatctgggaaaggaggacttcacatctctgtcactagtcctgtacagtagaaaatttcccagtggcacgtttgaacaggtcagccaacttgtgaaggaagttgtctccttgaccgaagcctgctgtgcggaaggggctgaccctgactgctatgacaccaggacctcagcactgtctgccaagtcctgtgaaagtaattctccattccccgttcacccaggcactgctgagtgctgcaccaaagagggcctggaacgaaagctctgcatggctgctctgaaacaccagccacaggaattccctacctacgtggaacccacaaatgatgaaatctgtgaggcgttcaggaaagatccaaaggaatatgctaatcaatttatgtgggaatattccactaattacggacaagctcctctgtcacttttagtcagttacaccaagagttatctttctatggtagggtcctgctgtacctctgcaagcccaactgtatgctttttgaaagagagactccagcttaaacatttatcacttctcaccactctgtcaaatagagtctgctcacaatatgctgcttatggggagaagaaatcaaggctcagcaatctcataaagttagcccaaaaagtgcctactgctgatctggaggatgttttgccactagctgaagatattactaacatcctctccaaatgctgtgagtctgcctctgaagattgcatggccaaagagctgcctgaacacacagtaaaactctgtgacaatttatccacaaagaattctaagtttgaagactgttgtcaagaaaaaacagccatggacgtttttgtgtgcacttacttcatgccagctgcccaactccccgagcttccagatgtagagttgcccacaaacaaagatgtgtgtgatccaggaaacaccaaagtcatggataagtatacatttgaactaagcagaaggactcatcttccggaagtattcctcagtaaggtacttgagccaaccctaaaaagccttggtgaatgctgtgatgttgaagactcaactacctgttttaatgctaagggccctctactaaagaaggaactatcttctttcattgacaagggacaagaactatgtgcagattattcagaaaatacatttactgagtacaagaaaaaactggcagagcgactaaaagcaaaattgcctgatgccacacccacggaactggcaaagctggttaacaagcactcagactttgcctccaactgctgttccataaactcacctcctctttactgtgattcagagattgatgctgaattgaagaatatcctgtagtcctgaagcatgtttattaactttgaccagagttggagccacccaggggaatgatctctgatgacctaacctaagcaaaaccactgagcttctgggaagacaactaggatactttctactttttctagctacaatatcttcatacaatgacaagtatgatgatttgctatcaaaataaattgaaatataatgcaaaccataaaaaaaaaaaaaaaaaaaaaaaaaaaaaaaaaaaaaaaaaaaaaaaaaaaaaaa

SEQ ID NO: 580 - DNA, 1718 bp, Artificial Sequence
  CXCL8
gagggtgcataagttctctagtagggtgatgatataaaaagccaccggagcactccataaggcacaaactttcagagacagcagagcacacaagcttctaggacaagagccaggaagaaaccaccggaaggaaccatctcactgtgtgtaaacatgacttccaagctggccgtggctctcttggcagccttcctgatttctgcagctctgtgtgaaggtgcagttttgccaaggagtgctaaagaacttagatgtcagtgcataaagacatactccaaacctttccaccccaaatttatcaaagaactgagagtgattgagagtggaccacactgcgccaacacagaaattattgtaaagctttctgatggaagagagctctgtctggaccccaaggaaaactgggtgcagagggttgtggagaagtttttgaagagggctgagaattcataaaaaaattcattctctgtggtatccaagaatcagtgaagatgccagtgaaacttcaagcaaatctacttcaacacttcatgtattgtgtgggtctgttgtagggttgccagatgcaatacaagattcctggttaaatttgaatttcagtaaacaatgaatagtttttcattgtaccatgaaatatccagaacatacttatatgtaaagtattatttatttgaatctacaaaaaacaacaaataatttttaaatataaggattttcctagatattgcacgggagaatatacaaatagcaaaattgaggccaagggccaagagaatatccgaactttaatttcaggaattgaatgggtttgctagaatgtgatatttgaagcatcacataaaaatgatgggacaataaattttgccataaagtcaaatttagctggaaatcctggatttttttctgttaaatctggcaaccctagtctgctagccaggatccacaagtccttgttccactgtgccttggtttctcctttatttctaagtggaaaaagtattagccaccatcttacctcacagtgatgttgtgaggacatgtggaagcactttaagttttttcatcataacataaattattttcaagtgtaacttattaacctatttattatttatgtatttatttaagcatcaaatatttgtgcaagaatttggaaaaatagaagatgaatcattgattgaatagttataaagatgttatagtaaatttattttattttagatattaaatgatgttttattagataaatttcaatcagggtttttagattaaacaaacaaacaattgggtacccagttaaattttcatttcagataaacaacaaataattttttagtataagtacattattgtttatctgaaattttaattgaactaacaatcctagtttgatactcccagtcttgtcattgccagctgtgttggtagtgctgtgttgaattacggaataatgagttagaactattaaaacagccaaaactccacagtcaatattagtaatttcttgctggttgaaacttgtttattatgtacaaatagattcttataatattatttaaatgactgcatttttaaatacaaggctttatatttttaactttaagatgtttttatgtgctctccaaattttttttactgtttctgattgtatggaaatataaaagtaaatatgaaacatttaaaatataatttgttgtcaaagtaaaaaaaaaaaaaaa

SEQ ID NO: 581 - DNA, 6554 bp, Artificial Sequence
  ACSL6
cggcagcggcggcggcggcgcggctactgctggggctgctgggctgcggggctgcggggctgcgggtcggggaggccgggccgggccgggccgggccccgctgaccgccatgctgaccttcttcctcgtgtcggggggctccctctggctattcgtagagtttgtcctctcacttctggagaagatgcagacacaggagatcctgaggatactgcgactgcctgagctaggtgacttgggacagtttttccgcagcctctcggccaccaccctcgtgagtatgggtgccctggctgccatccttgcctactggttcactcaccggccaaaggccttgcagccgccatgcaacctcctgatgcagtcagaagaagtagaggacagtggcggggcacggcgatctgtgattgggtctggccctcagctacttacccactactatgatgatgcccggaccatgtaccaggtgttccgccgtgggcttagcatctcagggaatgggccctgtcttggtttcaggaagcctaagcagccttaccagtggctgtcctaccaggaggtggccgacagggctgaatttctggggtccggacttctccagcacaattgtaaagcatgcactgatcagtttattggtgtttttgcacaaaatcggccagagtggatcattgtggagctggcctgctacacatattccatggtggtggtcccgctctatgacaccctgggccctggggctatccgctacatcatcaatacagcggacatcagcaccgtgattgtggacaaacctcagaaggctgtgcttctgctagagcatgtggagaggaaggagactccaggcctcaagctgatcatcctcatggacccattcgaagaagccctgaaagagagagggcagaagtgcggggtggtcattaagtccatgcaggccgtggaggactgtggccaagagaatcaccaggctcctgtgcccccgcagcctgatgacctctccattgtgtgtttcacaagcggcacgacagggaacccaaaaggtgcgatgctcacccatgggaacgtggtggctgatttctcaggctttctgaaagtgacagagaaagtgatctttccgagacaggacgatgtgctcatctccttcctgcctctggctcacatgtttgagagagtaatccagtctgtcgtctattgccacggagggcgtgttggcttcttccagggagatatccgccttctctcagatgacatgaaggctctatgccccaccatcttccctgtggtcccacgactgctgaaccggatgtacgacaagatcttcagccaggcaaacacaccattaaagcgctggctcctggagtttgcagcaaagcgtaagcaagccgaggtccggagtggaatcatcaggaatgatagtatctgggatgaactcttctttaataagattcaggccagtcttggtgggtgtgtgcggatgattgttactggagcagccccagcatcaccaacagttctgggatttctccgggcagctctagggtgccaggtttatgaaggttatggccaaactgagtgcacagctggatgtaccttcaccactcctggcgactggacctcagggcacgtaggggcgccacttccctgcaatcatatcaagctcgttgatgttgaggaactgaactactgggcctgcaaaggagagggagagatatgtgtgagaggaccaaatgtgttcaaaggctacttgaaagatccagacaggacgaaggaggccctggacagcgatggctggcttcacactggagacatcggaaaatggctgccggcaggaactcttaaaattattgatcggaaaaagcatatatttaaacttgctcagggagaatatgttgcacccgagaagattgagaacatctacatccggagccaacctgtggcgcaaatctatgtccatggggacagcttaaaggcctttttggtaggcattgttgtgcctgaccctgaagttatgccctcctgggcccagaagagaggaattgaaggaacatatgcagatctctgcacaaataaggatctgaagaaagccattttggaagatatggtgaggttaggaaaagaaagtggactccattcttttgagcaggttaaagccattcacatccattctgacatgttctcagttcaaaatggcttgctgacaccaacactaaaagctaagagacctgagctgagagagtacttcaaaaaacaaatagaagagctttactcaatctccatgtgaagttcaaggaaagttcttctcagtgtaatgaactgtctagcaatattatagttattcttgaaagtaatgagtcaaaatgacacagctgaaaatgaataagcatctgattttatgactgagccttttcctgtcccaagaggtctttaacaatattttctctatcatcaatgagtatattttatttttattataaaaatgatattgtggtggactgctaaaaatatcacaaatggcaatgtaaaaatcaagacattttctcaagaactgtgtaccactaaaagtaatatattgtcaatgttcacagaactattaaacataaaggaaaaacataagtgatatattctacttaattatttgtgaatcagtaaccagatgcagcaaatatctaggcaatgtggactacctcattcagtaactgattgtcaaaatcacaattaaatcagacttcaaaaattaaagctaggtgtatagaatcatgctaaaagaaaacatgataactcatagtctacgtaacttcagagtctttaaacatgacaatccacattgtcatatgtgaaaattttctctctgatttttactttcattcatgaaaaatgaaaattcagaaattctttttttcctttttgttttgagacagggtctgctctgtcacctaggctggagtgcagtggcttaatcatggctcattgcagtctccatctcctgggctcgagtgatcctcctgtctcacctcccaagtagctgagactacagtacaggcacatgccaccacacctggctaatagaaattttttttttagagattttgctcaggctggtctcaaactcctgagctcaagggatcctcccgccttggcctccctaagtgctaggattacaggcatgagccattgttcccagccaaattcagatattattaaaacacatgtcatatttatatagtaacttacaaagacctttcaatacattttctcatttattaagctcattaaagtattcaggaactacctagaaaaaatataatgtaaaactattcaaggatagtgtgtgtatgttcatggacttcttattataatgaattctaaaagacatctgttgactctacaatgaatggatccttgaggaatacttgggagaagaaactcagagttatttctcagggtaggcagcaattaatgtacctacattccttgctggggtcttctagtcttccattcccaatgtgcccatgctatgcctggaaaccctatatggttgtaattctgaacaatttcactttttttccagtaagaatatcaaggcagaaggtgggaaggaggggacattatttccagggaaaatagtttttcaacaatataactttgataaacctctttaaaatgccccaagaaaactttttaagtccatagacaaagaaatactgcctaatggcataattacattcctaaaatctttaagcgtgccgaagtttaaccactaaaacctcctttcttgcattatgtatttagatgcaccctgtattggggtgtcaacaatttcttataattaaaggccagataccatggacagcaattaagttccaagctatagattgtgcctctgaaaaaggcatggaccccaggaacgtgtttttcttctgtagagacaagactctaaaagcatatcaacaatccatatgcaattcatgtgttaatttaaaatgtatgtgctcagtgtttgtagtctagaagctcctttcccttggaggaatgccaagcagtttgcaaaaataaatgctgttagttaaaaaccacataatcacatgggcctactgaataaatatgcatcagtgattatatacttatatttcagtcttgtcaaaagtgaatcactgtttcatttgatgtatttacccagtctttttatccagtttttcttgggcatattctctctgaagacccactgttgcacttctaaatttgacagttaagaaatgagctagttctatacacactgatttttaaaggcgtttctgaataaactaatacttaaaatgtccaaagtcacatctgtacagcattagatttttatatttaatatatatttgactaattaaaagtgaaagttgttacctgaactggatattcatactattttaagggcaagttgcttacatttcaataacaacaaaaaaagaatctgtttcccattgtcctcctactcaactaaaattcatagttggctttaagcccaaaagaattttgaacaatgtgacagaaacaagtaatgtaaaacttattttgttttatttatactttataatagttagatataacagattatggacaacttaatatttcttctttttggctgggcgcggtggctcatgcctgtaatcccagcactttgggaggccgaggcgggcagatcacgaagtcaggagatcgagaccatcctggctaacacagtgaaaccccgtctctactaaaaaaatacaaaaaattagccgggcgttgtggcgggcgcctgtagtcccagctactcgggaggctgaggcaggagaatggcatgaacctgggaggcggagcttgcagtgagccgagatcccgccactgtactccagcctgggcaacagaacgagactccgtctcaaaaagaaagaaaaaaaaaaaacaaaaacaaggtttcttctttttgccacttaaaatatcttatatttctagatttccaggtctatgtggaaatcatcacacttgggccaataaatgggttagttcagatgtgctgagaaaagtaaatagtgtaccctaaatatcttgcatgtacatttatctatttctctgtttaatgccacttaattttgtaagaaatgagaaatgaaaccctatgtatcagtggaaaaatccttcttgcttcagatttcccaactttattctggaggagaaaaaaatctgtatttctcattaacagagatagaaaaaggtgatgtacttacgatggtcacattcatattgggcattggatctatttaagcctagaagtataacagataatcagttccttaagtgtaaatatgttcttaaatgtttggcctttttatctgttattcaaatgtattagtaattctcatattttgcaaacagatccttttgtgtatattataaaatatataccaaatctgtttttccttttgctgtggaagatgtctttatataatattgagacttcccttgcaaatgagagacgggactctggtcaggtatagtgtgtaggcctagccccatgtattaggaactcataaactcagaaatccaaggattaaacattttatgtctccttcatttatgcaagtcatgctttcattctacatgtagttaaaactacaagtatgagaaaaaatagaactttccattggaattttttccaatcaggtaatgttttagcaacttgaaatcagcacttaatttgattgtattacctatcaaagaaccaataacctttcctttttctgcagtaaagaaaatgaaatatcctttattttccaaatgtatgaagcacaaatgcaatatagttatttaaaatataaaatactttaaaatgaatgtgaagaatgggaaaatatatttttgcatgaaaacagactacttacaaatgtgcttaatatctcaggaaaaaaagaatgaataaccgtatataaaattggtaaactataaattggctgtatttccttgccggttttaattttaaggaagcatttacatgaaaagaaaaaaggatcctagtagtctgaatttcctctcaagtatgctagaaaatactttctatgaatttacaattaactgcaataagaagtgggttagcattcaagtaaggtcaataccccaaatgagaaactcttcagttagaacacattagtggttgtaacacagaggcagtagataaatatttgaaatgtgagcatttctaaacttggtaccaaatggaaagggtttcatgaggtgacagtggcttttaaacattcatttgaccgattattctaattttccttgttaaatcattgcaacagttgcatgggggagaatggatattttttgaagaattgcttattccactttcaatttttaaaaatcgaggggattaaaatattactttttaaatatgcataaaagtatcttaactgtaattacattttcagttgctttgttatagtagcatgcatattaaatataaaatgcatttatgaaaatttttgtaaaaaataaaagatttttcatttctcaaaaaaaaaaaaaaaaaa

SEQ ID NO: 582 - DNA, 5271 bp, Artificial Sequence
  DLGAP1
acttagaatcggcaaatcatagagagaagctaaatgctctcagctgcactataccaaatcaaagctgagatgaataatgaacttaattttccataaagacattctgtttggcattccagctaataaggttccacaagatgaatggacagggtacaccccacgaggtaaagatgatgaaattccatgccgaagaatgcggagtggcagttatatcaaggccatgggggatgaagacagtggagactcagacacgagtcctaagccttctccaaaagttgctgcgcggagagaaagctatctcaaggctactcagccatcccttacagaactcaccacactcaaaatctccaatgaacactcacccaaactccagatccggagtcatagttacctgagggcagtgagtgaagtctccatcaaccggagcctggacagcctggaccctgcaggcttgctcacatcaccaaagttccgctccaggaatgagagctacatgcgagccatgagcaccatcagccaggtgagcgagatggaagtgaacgggcagttcgagtccgtgtgcgagtccgtgttcagcgagctggagtcgcaggccgtggaagcgctggacctgcccatgcccggctgcttccgcatgcggagccacagctatgtgcgggccattgagaaaggctgctcccaggacgacgagtgcgtgtccctgaggtcgtcctcgccgccgcgcaccaccaccaccgttaggaccatccagagcagcacggtgtcatcttgcattacaacatataagaagacaccacctccagtcccacccagaactaccacgaaacctttcatttctatcacagcccagagtagcacagagtcagcccaggatgcctacatggacggacagggccagcgaggagatattatcagccagtctggactcagcaactccaccgagagcctggacagtatgaaggctctgacagccgccatcgaagctgcaaacgcccagatccatggccctgccagtcaacacatgggcaataacactgccaccgtcaccaccacgactaccatagccaccgtcaccacggaggacaggaagaaggaccactttaagaaaaatcgatgcctgtctatcgggatacaggtggatgatgctgaagaacctgacaaaacaggggagaataaagcacccagtaagttccagtccgtgggagtgcaagtagaagaagagaagtgcttccgcaggttcactcgatccaacagtgtgacgacagcagtacaggccgacctggacttccatgataatctggaaaattctctggaatctatagaggacaattcgtgtcctggccccatggccagacagttctcccgcgatgccagcacctccacagtcagcattcagggctcaggaaaccattaccatgcctgtgccgccgatgatgactttgacacggattttgacccctctattctgcctcctccggacccctggattgactctatcactgaagaccctctggaggccgtgcaaaggtcagtgtgccaccgggatggccactggttcctgaagcttctccaggcagagcgagaccgcatggaggggtggtgtcaacagatggagcgggaagaacgggaaaacaacctgcccgaagacattctaggaaaaatccgaaccgcagtgggcagtgcccaacttctcatggcccagaaattctaccagttcagagaactgtgtgaagaaaacctgaatcctaatgctcatccaagacccacctcccaggatttggcggggttttgggacatgctgcagttgtccatagaaaatattagtatgaaatttgatgaacttcatcagttaaaggccaataattggaaacagatggatcctcttgacaagaaggagagaagggcccctcctccagtgccaaagaagccggcgaagggccccgcgccgctgatccgggagcgctcgctggagagctcgcagcgccaggaggcccgcaagcgcctgatggccgccaagcgcgccgcgtccgtccgccagaactcggccaccgagagcgccgagagcatcgagatctacatccccgaggcgcagacccggctctgagcgccccgcagcccggccgccgccgccaagcatctgtcccctcctcccccggccgctcctctgccggctgcctctccccctccgagcccgtccgctcccgagctcggtgacttccactgtcgcggtgtagttgtccacctcgcaggagccgccccccgggcccccctcagccccccacttcccgtacccgtttgcccatctccttcttcaccgagcttcgccccctgtcctgatgccgtcgccctgcctcatactgagatccaaccctttattttctgggcaaagccaaacccacctgtgtagaagtgatgcctttaggtcacccgccgtcctcagttctctcgagctagtctgttcagcaatataaaaccatagggtatttcagaaatccagtatcacagggtgatcctttgggacttaccgtcttccacgtgaaagaaactaggcctccgattccctttatttcccctaaatggttattcttttaaaaaagcagatggagcactttattcccaacctcagaaatcacaccatctcactggaatccatgagggacacagagagaggggaccaagcctggcctgggggtgggggacctggatgtgtagcaaggatgggagaagcgaaatctgcaggtgctgggggcacctgcacactcacagctgcacaaactgcctcactgttacttcatcaatcacagcttcaaatgtctcaatcagcagaagattgtaaattcgatctttcagggaaattaatctattctgaaaggcaataacatgaagcaaggcaaaggaggcactgatggtttagtatactacataagggatttttttgttctattattaagaaaatctagacctgaaatgttttctcaactcttattgtactgtgtatatttatattgttgtcgtggcggctgtttttaaagggaaagtgttggttctattaatttgttaagtgtccatccaggtgggcctacctgattccacatatataagtacatatctgcttataaagcgctgtaaatggcagcaaggctgtttttggagaagagtttgggttttcctaccatccctttgaatgctacacatccgtctattttaacccaagtagttcgtatttcagatatattttctcctttcatctcctctcactactgcagagtccagtaatacctagcataggattctgtcctgtgtcaaatggctaaaataaatttttgccccaatagacatgctgcctcattcaaaagagctgccgctgtcatcttgaggttccaggtagtgagagaagaaactcgacctgccagggtcaacagccatgaagaggtggggggagtcatgattcataaacactgaaagaagtcaaggcttttggcagagagtgttgatttagatttttagtcttgattgatgggcagtatgcatcggtgtctagctgaagttgtctttaaatgcccttactcgtcacagtttaaacacttaggatgtggcaatcttaagtatcaatggcattttatgtccagctaacatcctaaagcattagaaattaaaaacgaaagacttttaaaaacatacatcaaacatgcttgcaccagagaagctttttaaaataatacactctcatagccaggtgctaatttaattttacttatgaaattaagagaggtgatgggttctagcaacagatattttcacggacatattctaaaaccactagagaattcgctacctctcagagccatcgatgctttgagctacctttataaacagggcacaaatgtttactgctgtggtttacaagaaaagggctactcacttattttgaaaccaacgaaccaacttttaactagggtgaacaaagcactcaaagtgctttgtgaaattggagcatacagagattttgagcttcaagtatttgctagttttaaaaagaatacaccttttctttaccttgtagcagcaattaaaagtcacacaaagcttgcatcgagtagggccaactgccacttgggtagcctatggtcacattcaatactgagaatgacttggaactcacagattaatatgaaagaagcagcgttcatcccaagacccatgctcacaattacagctccgtgccctgaggtagagttgagatttggattaagaaatagatttctaatacgactcaagatcatcctacaatattttctttggaaactaatttagcccatgatattttaaagagagacaagagaaggcctatttatcttgtctaagtgaacggcatttgtatattcataagctatttttggtaagaattttaaatcttttagctcaaggcctacagggcatcatgatctttgccttccttgaaaatacaatttaaattgtacaaacactttataaaaagctaattattggtgttagaacatgaccccacacaatgctgcttgacccctgaaactgacattcatgagcataacctttgttacattgttctttttgatgtaatttgtagaaatgttttttagttcgtaatggaaaatgtatgtaccctgaaaaattacttattttgtttaactttggtataaaggtgttgggcattttcttggggagggggggattacaaaagaagtttgtctcccacatcaaaaaacgttcaaagaaattaagtatttattatattttttgcagatgtttccatacaattcacataacctttttgtaaagagagatgaagaaatggattaaagatttttaatatttgaaatggtaaatagaactaatttattgtaatatatttctgttatttatagatgtttccttaatgttttactgtgcattaccactttcatttaagccttatccttgtgaatttaccatttcttttttaaaacatgtctagatgcatattttaaataactggaatgtaaatcactagcatatctgaattcccaaatgtaatttttaaaaattattttggtttggaaaaaaaagattcatttgaaagccttcagatggaggggtgggaacatttttatggctttatgaattggaatttcataggcttatttacctagattgtgtgtgaacaaaaaaatattgtaaatagatgaatgtttcccataatgtaaaaagaagaaattaataaaataattaatgcactgctaaaaaaaaaaaaaa

SEQ ID NO: 583 - DNA, 4141 bp, Artificial Sequence
  NTRK3
acatttctgcagccgcgcggcgagccattcgcggcggctgctgcagctcctactgcatcttccttctcttcctttcctcgggctccggtctcggagtcggagagcgcgcctcgcttccagagcccccggacccggcgagtcagcgatcgccgagccggccaccatgcccggcagaccgcgccactaggcgctcctcgcggctcccacccggcggcggcggcggcggcggcggcgtccgcgatggtttcagacgctgaaggattttgcatctgatcgctcggcgtttcaaagaagcagcgatcggagatggatgtctctctttgcccagccaagtgtagtttctggcggattttcttgctgggaagcgtctggctggactatgtgggctccgtgctggcttgccctgcaaattgtgtctgcagcaagactgagatcaattgccggcggccggacgatgggaacctcttccccctcctggaagggcaggattcagggaacagcaatgggaacgccagtatcaacatcacggacatctcaaggaatatcacttccatacacatagagaactggcgcagtcttcacacgctcaacgccgtggacatggagctctacaccggacttcaaaagctgaccatcaagaactcaggacttcggagcattcagcccagagcctttgccaagaacccccatttgcgttatataaacctgtcaagtaaccggctcaccacactctcgtggcagctcttccagacgctgagtcttcgggaattgcagttggagcagaactttttcaactgcagctgtgacatccgctggatgcagctctggcaggagcagggggaggccaagctcaacagccagaacctctactgcatcaacgctgatggctcccagcttcctctcttccgcatgaacatcagtcagtgtgaccttcctgagatcagcgtgagccacgtcaacctgaccgtacgagagggtgacaatgctgttatcacttgcaatggctctggatcaccccttcctgatgtggactggatagtcactgggctgcagtccatcaacactcaccagaccaatctgaactggaccaatgttcatgccatcaacttgacgctggtgaatgtgacgagtgaggacaatggcttcaccctgacgtgcattgcagagaacgtggtgggcatgagcaatgccagtgttgccctcactgtctactatcccccacgtgtggtgagcctggaggagcctgagctgcgcctggagcactgcatcgagtttgtggtgcgtggcaaccccccaccaacgctgcactggctgcacaatgggcagcctctgcgggagtccaagatcatccatgtggaatactaccaagagggagagatttccgagggctgcctgctcttcaacaagcccacccactacaacaatggcaactataccctcattgccaaaaacccactgggcacagccaaccagaccatcaatggccacttcctcaaggagccctttccagagagcacggataactttatcttgtttgacgaagtgagtcccacacctcctatcactgtgacccacaaaccagaagaagacacttttggggtatccatagcagttggacttgctgcttttgcctgtgtcctgttggtggttctcttcgtcatgatcaacaaatatggtcgacggtccaaatttggaatgaagggtcccgtggctgtcatcagtggtgaggaggactcagccagcccactgcaccacatcaaccacggcatcaccacgccctcgtcactggatgccgggcccgacactgtggtcattggcatgactcgcatccctgtcattgagaacccccagtacttccgtcagggacacaactgccacaagccggacacgtgggtcttttcaaacatagacaatcatgggatattaaacttgaaggacaatagagatcatctagtcccatcaactcactatatatatgaggaacctgaggtccagagtggggaagtgtcttacccaaggtcacatggtttcagagaaattatgttgaatccaataagccttcccggacattccaagcctcttaaccatggcatctatgttgaggatgtcaatgtttatttcagcaaaggacgtcatggcttttaaaaactccttttaagcctccttgttttgatgtcaccttggtaggctgggccctctgagaggttggaagctctaggcattgttctctttggatccagggatgctaagtagaaactgcatgagccaccagtgccccggcaccctttaacaccaccagatgggtgttttcccccatccaccactggcagggttgccccttccctccaatcatcactgtgctccttttttcccggcctacgaggcagctcctgccactatctttagagccaataaagagaattaaaaacctgtgcaccaggagcatcttttaaatacactagccattctcttgctttacaaaaacaacctaaccatcacaagaaagcctgatgaagtccagccgtgctccagcctcactttccctgcttggaagcgtggggtctccctggctctcccaggataccatgctgtcctcttagtgacctcgtcgccctgcaacctccagtggggaagagtcacagagagcacctaagcagaggtggagacggcgcggtaagaggagggggagccaggctcaagtattggcaccaagttaggtctcagaggaaagaatggaaaccaatcactttacatttttatttttattttcggtggaaaaatcatccttttttgggacatacttgccccctacttcctcttctctctggaacggctcacaatgagtgtgacattagaaaactccttgcagaggagagtttctccaggctcttcctgggcccttagatctgcagttccgacaagctttggctgcaggaggttttacccatgaactggccatcctactaggaccacaagggaccaagggaatcagggacaaaggcccttcctgccagcccatgatcccgggattggctctcttcccctacttccacttattcttgactctgagaacttttggaacccaatggaatcagcatttcaaggtcaagatgaactgaaggggaagagaagtaaaacttggcctcctccagcccctctcatggcaccaatggaagtgtcctcctgttctctggtcaatatgtgtgtttactttgcttgctttgactcatgccttactccatggccaccctctcccaaagagggggctcgcttcccccattttcaacttgatccactgaggagagggaagggggtgactttcccttcttcagtaggaaaggcacatttgtagggcctgaaactctcccgtatttgctgactcattggtggagtagacttctggctcccagctccactggcccatggggcctccattgtatgaagtcagcataggctgcccacctaatggtggagagcatgaaactgggagcatcctgtggggggcttgtgggggaaaaaggtggttgttttaacccaccgttgttttggggtggtgttgcacactagtagagaatagagtctatgcctttggcaaatttaactgggagtttggattcccacttaagggttttacttcttgggtcctgtggatggtggttcttcgtgtcaggatcccagcccgattctgcaaatgcctccatggggtttaaaaacatgaggctttccaagttcttgcccagtatctggggcagcctccagagtatcacctgggagttcaggttctctccagggctccaggtgtgtgtttatctcgccccctccagctctcctcatcctgctccccattgctccatgtcaggctgttccccattgtgccctgctgatgctttgggtccagggcctcctcccaagtgtggctttaaggagtaagcttgaggatgatgttttttaattattgtaaatcattacctcatttccagcctcccaggctccatccatcccagcatcttttattctgccattttcctcaccttgtgctatgacaatggggcgttgtgtttccacagagacttataggagtgttcagtgtatagtttcttaataaacactttattttctaatgaaaaaaaaaaaaaaaaaa

SEQ ID NO: 584 - DNA, 1955 bp, Artificial Sequence
  MSMO1
cccggctccacccccaagccaggcgaggcaggttccgaggttggaacacctggcgagtcctcggtgtcggtggccggcagtcatctcgcggccgttcaggataagccagagacatgggaaaaccaatggaagtgtttcaaagttcttctctttaatcacttctgtatccagctgcctttgatttgtggaacctattattttacagagtatttcaatattccttatgattgggaaagaatgccaagatggtattttcttttggcaagatgctttggttgtgcagtcattgaagatacttggcactattttctgcatagactcttacaccacaaaagaatatacaagtatattcataaagttcatcatgagtttcaggctccatttggaatggaagctgaatatgcacatcctttggagactctaattcttggaactggatttttcattggaatcgtgcttttgtgtgatcatgtaattcttctttgggcatgggtgaccattcgtttattagaaactattgatgtccatagtggttatgatattcctctcaaccctttaaatctgatccctttctatgctggttctcggcatcatgatttccaccacatgaacttcattggaaactatgcttcaacatttacatggtgggatcgaatttttggaacagactctcagtataatgcctataatgaaaagaggaagaagtttgagaaaaagactgaataaatatctcacgtaaaccttcctgaaagataaacgttttcctgaattcagaaactagtagctaacattgcttctggagagcagaaataagcatgtcttctggctactaagtgataaaaagaacattaacaacctttaattaccttcctagtgggaactttttctactttacctacaagttctatatatgtagaaatgaataaatatatatttaagtacagttttcatgaggaagttttaaaagaccatgttcctaagcttccaagaaggttttggatactagaagtattaatctatggcttttctcccagtaaaaccataggcctgaagttcacattgggtctttaaatcttttagatatatactggtcatttcagaaaattcttcatagtggtattggccttatatttaactttttttttattttttttttgagacaaagccacactctgtctccttggctggagtgtggtggcacagtctcagctcactgcaacctctgcctcccagttcaagcaattcttctgcctcagcctcccaagtagctgggattacaggcacccgccaccacgcccagctaatttttgtatttttgtagagatggggtttcacgatgttggccaggctggtctcaaacttctgacctcaagtgatctgcccaccttggcctcccaaagtgctgggattacaggtgtaagccactgcgcccggcctttttaactttaaacatgttttagaattcacctaaagatcaaaatatcatggattgaacctcatcaattgatagcagtgagtgactgaagcttccaaatcaagaaaagccggcaccaagaacttccattctaatctagagctgaccagtttgagctgattctctctttgaagagtccttcttgattgcagtgcagtactggcatttctgaatggatgtaagtggagtattttagtctaaaggcttttcaaattacttgaatttttttaaaaattgaggagctttatttctatttacccttccatttttgtatatcaaatttccattgtcattaaaaactgtatcttgaaactttgtgaactgacttgctgtatttgcactttgagctcttgaaataaatgtgatttttgtgtgattatctggtttccagttttaaacattaactgtcaccttttattcttaaacttgaaagtacagaaatcattaaattattaagttgtacaataaaaaaaaaaaaaaa

SEQ ID NO: 585 - DNA, 3044 bp, Artificial Sequence
  HPGD
gctttattgtttgcttgttttgttccggagtcggggccgggagggagtgcaggaggagggatccaagcttccaagcctctgctccgctctccttctatccagttggtctttagggcactgaaggaaactcttcttcagaaataaccttttaacttttcttctgtcagctgcctgccaatcacggagccagaggctgaggggaggctttgagccggtctgcgagtccggaaggcaaagatcgcgaagcttggcgctccagaacgctcagggggcaggtgacacagtcgtgggttccccggcgggcgctggcttgacagtttcctccccgcccactggcaggggagcgccccgccgggctgcacgcgcgcgcgcgcaggggggcataaaagccgcggccgcgcggagacgcggagctcgcccaccgcccgccccagcagtggctgcaccatgcacgtgaacggcaaagtggcgctggtgaccggcgcggctcagggcataggcagagcctttgcagaggcgctgctgcttaagggcgccaaggtagcgctggtggattggaatcttgaagcaggtgtacagtgtaaagctgccctggatgagcagtttgaacctcagaagactctgttcatccagtgcgatgtggctgaccagcaacaactgagagacacttttagaaaagttgtagaccactttggaagactggacattttggtcaataatgctggagtgaataatgagaaaaactgggaaaaaactctgcaaattaatttggtttctgttatcagtggaacctatcttggtttggattacatgagtaagcaaaatggaggtgaaggcggcatcattatcaatatgtcatctttagcaggactcatgcccgttgcacagcagccggtttattgtgcttcaaagcatggcatagttggattcacacgctcagcagcgttggctgctaatcttatgaacagtggtgtgagactgaatgccatttgtccaggctttgttaacacagccatccttgaatcaattgaaaaagaagaaaacatgggacaatatatagaatataaggatcatatcaaggatatgattaaatactatggaattttggacccaccattgattgccaatggattgataacactcattgaagatgatgctttaaatggtgctattatgaagatcacaacttctaagggaattcattttcaagactatgatacaactccatttcaagcaaaaacccaatgaacagcttatgtgttagccatagctgaaaataagcacaaatagcttatattcagatcctatcttcatttgaatatagcttttaaatgaaatgttacagtttgaagttttccttcatgcacttggtgataaacgttttctaaatttttagttaagtatatggataaaaagttatgaactattaaaaatgtgatgtggaccaaaggctaggttgtaatcttgatagtctaaaaaatgatcaaaacaaatgattttcaaggaatattcaatattctgcctttcagaaagtgtatttatatctgtgcttcataaatattaatgttcttcagaacatcattttaaaggagatacttgaattgttatttaaatcaaaccagatgtaaaacactcacatacaagttcatactttaaaagaggaaagctacttaacaatgacaaatatttcacaataataatttttacttatataccatctttcaactgaacatttcagttcttccaagagcttcttagagtagtatattttgggggcagtcaaggaataaactacagtgtaaacatatcccagatgaaaactgctgtatggaaaaatgacagaaagtaactgattgacactgttgattcacagttcagcctcctatctgggaaagacatttctttcctctgctcactttaagaacttttaccgactccaaaaatctcaggaattaaacttttaacagttacagcaataaagaatagttagtactccaaaaatattatatttaagatgctcaacaagaaaaaaatgcaaatgtaatatttttttcaaattacttctttattgacttgtccaaatttcaaaagtgcctacccttcaataaaacttttttattctgatctccataaattacttagtcttctatgtatagctatcaaggaaataaaaccaattttgccacagccacaactgtaaatgtttttgtacccatgctgaaactcataacaacacagacataaaaatagctgtgaggttttgctttttttgttgtcagctatcttaagaatcattaaatacacctgctttgggtaaaactctttgcaagcagtaattaacactagtaacagtgaaagcacaagatttccaaatcagtcgttttctcaaaaaaatatcgtataagtgactcatcctgtctgctaactccagacctcccagcttgaagccaaatctttccatgtgagattgatatggatttcctagaagtactggaatgttgtcatatcttgccctattttaattctgctatagaaaacaattgccttcacttttaaggagtaatttgaatattaataactctggtctagattttcatataatgtattaaagacaaagtagtgaacatcaatgaacatctgatagagataaactgtaatcaggcataagcttgtttgtatgttctggcagtgactaatcagtaaatgatgtcggtttgcccagtatcacttatcttctgtatttttcctctgtcgtgtaaatagtataaccttttcatttatggacaattttttggactagtagccttcaatatacattctgctttgaattaattttttcaaatcaataaattatgtagacatttaaaatcaaatatcaagtagaattgaaaaatgtgagttacataagttaaaaacttactttaaatcttaccttctataggtagctctaaataaattcatatggttatatggcatctctggtgtatactgattgagaaaataattaaactgaagttaggggaggggaaaaaaaaaaaaaaaaa

SEQ ID NO: 586 - DNA, 5805 bp, Artificial Sequence
  PDLIM5
gtgtcctgggtcgggggtggggcgagggagagccaggaggcggaagttcccgcgggcggtggggacggcgccctcaccgcgagtcacttgtcagcccttgtctgaggcggaggcagccccgcgccgcgccggacccgagcatatttcattttctgtcattggactttgagccattagaaccatgagcaactacagtgtgtcactggttggcccagctccttggggtttccggctgcagggcggtaaggatttcaacatgcctctgacaatctctagtctaaaagatggcggcaaggcagcccaggcaaatgtaagaataggcgatgtggttctcagcattgatggaataaatgcacaaggaatgactcatcttgaagcccagaataagattaagggttgtacaggctctttgaatatgactctgcaaagagcatctgctgcacccaagcctgagccggttcctgttcaaaagcccacagtcaccagcgtgtgttccgagacttctcaggagctagcagagggacagagaagaggatcccagggtgacagtaaacagcaaaatggcccaccaagaaaacacattgtggagcgctatacagagttttatcatgtacccactcacagtgatgccagcaagaagagactgattgaggatactgaagactggcgtccaaggactggaacaactcagtctcgctctttccgaatccttgcccagatcactgggactgaacatttgaaagaatctgaagccgataatacaaagaaggcaaataactctcaggagccttctccgcagttggcttcctcggtagcttccacacggagcatgcccgagagcctggacagcccaacctctggcagaccaggggttaccagcctcacaactgcagctgccttcaagcctgtaggatccactggcgtcatcaagtcaccaagctggcaacggccaaaccaaggagtaccttccactggaagaatctcaaacagcgctacttactcaggatcagtggcaccagccaactcagctttgggacaaacccagccaagtgaccaggacactttagtgcaaagagctgagcacattccagcagggaaacgaactccgatgtgcgcccattgtaaccaggtcatcagaggaccattcttagtggcactggggaaatcttggcacccagaagaattcaactgcgctcactgcaaaaatacaatggcctacattggatttgtagaggagaaaggagccctgtattgtgagctgtgctatgagaaattctttgcccctgaatgtggtcgatgccaaaggaagatccttggagaagtcatcagtgcgttgaaacaaacttggcatgtttcctgttttgtgtgtgtagcctgtggaaagcccattcggaacaatgtttttcacttggaggatggtgaaccctactgtgagactgattattatgccctctttggtactatatgccatggatgtgaatttcccatagaagctggtgacatgttcctggaagctctgggctacacctggcatgacacttgctttgtatgctcagtgtgttgtgaaagtttggaaggtcagacctttttctccaagaaggacaagcccctgtgtaagaaacatgctcattctgtgaatttttgaaagtcaacagttcaggagaagagaaggaatttgaagagaaaaaggaaaattaaaattactaattaatttttagattcaatatttatatggagttttgaaaaataatagtggccctgaaggaataaattccagctttaaaaaccaagtctgaggaaatatttggcttcataaagtaaagagacggtttggcatttattattactttttcctgtattttatgcccataaaataagctttataaaaaccaatttcctgatggactattaaattcatcttagaataaattagtgaagaatttaattttagaataaataatccaatctgaaataattataccttctttccttgttaggtagttatgagtaaatctgcaaaaggcaatgaaaatgccttaaattttatcaataacagaattattgtatttaaaaaaaaactaatacttatctttaaaatagtaaataggattttaaacagagaattttatcagtaataggtgtcagtttttaaaaaattgcttgtaggctgagcgcggtggctcacgcctgtaatcccagcactttgggaggccaaggtgggtggaccacatgaggtcaggagtttgagatcagcctggccaacatggtgaaaccccatctctactaaaaatacaaaaattagccggacgcagtggcacgcgcctgtaatcccagctactcaagaggctgaggcacgagaatcacttgaacccgggagggagaggttgcagtgagccaagatcgtaccactgcactccagcctgggtgacagagtgagactctgtctccaaaaaaaaactttgcttgtatattatttttgccttacagtggatcattctagtaggaaaggacaataagattttttatcaaaatgtgtcatgccagtaagagatgttatattcttttctcatttcttccccacccaaaaataagctaccatatagcttataagtctcaaatttttgccttttactaaaatgtgattgtttctattcattgtgtatgcttcatcacctatattaggcaaattccatttttttcccttgtgctaaggtaaagatttaattaaataattttggcctctcatagttttctctctctttaaagagaataaatagagggccaggtgtggtggctcacgcctgtgatcccagcactttgggaggccaagacgggcggatcatgaggtcaagagatcaagatcatcctggccaacatggtgaaaccctgtctctactaaaaatacaaaaatgagctgggcatggtggggcgtgcctgtagtcccatgtacttgggaggctgaggcaggaaaattcttgaacccaggagacggaagttgcagtgagctgagatcacaccactgcactccagcctggtgacagagcaagactccggctcttaaaaaaaaaaaaaaaaaaaaaaaaagagagagagagaataaatagaaaagaatgtggctgggaattgtgaatcagaagattataccccccaattgtttttcaatccccttttctcaaataataaattagttaaatcagtttctgagttatgccactggctgatgaagagttgagaggtctctttgcagaatgatctttttgtttcgttttgtttcttcttctgcatttaaaaattaaaagattggtttgaggatgtgatgaaattgagactttttgtggttttctctcaataataagtgaaccaatttcaaatgtgatcacaaagtttggaaagcttttattcacagaggttgggtagtgttgggaggggagtttaattactcagattggcctgttatttgatttcctcctttgggaaaagaattatgtagataccacatggagacagggaaacaattgtggtaaaactgtggatcctgttgctatttgcccagtgagaaaacagattctggtatttgatttggtttttctctttgtttccagaatggatgaaagtccatgaacctcctaagttataatttaaatttgtttggggcaaggtgattttatagtcgagacagagccctaggtccttcctgccccatcactcacttacgacatcacttccattgtgtgcatgtttgttatagaggaggttttaggctacaatatttgtttaacctccctaagaactttcaaggcatctgtcctgaaagctgttaatttatggtctagcagatttatattatatgcagataataattaactggggataaaagaatggcaaggggtgacacaaagtagcaaactgaatacttctccaatagcaaccccaagctacctcctcaccctgcatcttggagggaggcaggaaatttcttttgaaataaagtgctggagctgaattctgcattatttatcgttgctgctgaaaccacctataaaagacttgctggctaatgtgcattgtcatataatgtacactgtcacatctttacagtcttgtatgttatagaatacaaaataagttgatggttttgtttggtgtgagctttttgtttgtttgtttagttttgccttcataggttatatgccaagatagtatttgataagtcaatgacatttggatgttttcttcaaagaattttatttgacccagatttcttataaagttatcttacattaaggatgtcattttcatcagaccttctttctacatattattcatgaagcataatgttgcatttctccaaattttatgcctgaaagggtagtgttgcttcctaaggtatcatgttgtctttgtgctttgtccatctcttccgtggcgaagctttatatctgttcctaaaacagttaatcctgtgaaataaatattgaacataatccagaagaatctctctgtttcccttggggaatgccatatttaattcaccagcagtaatcctttaataactggcagagcactttattcttctggtgagctccctgaatatttatttttctgattataaattttctatattagtagcattttttaattattacttcttcactatagagcatttacttttagtctctagatgtatattttggaatgctgtacttggcataacatagattaaaatcataatgcatgactaaaaactccttggatttatttcccattttaaaatttttagcggtaagttcagatttataatctttctctagacttccatggtctgaatgttgcctgctgaagtagcaacctaaaaagtatcccctgcttatgcttgtccagttggccctccatgtccataggcttcgcatctgtgattcagcccactgtgggtcaaaaatatttggggaaaaaaatggatggttgcgcctttgctgaacatgtacaaacttttttttgtcattaaacaatatagtataacaactatttacaaagcatttacattgtattagctattataggtaatctagagatgatttaaagtgtatggtaggatgtgcataggttatatgcaaatactacaccattttctataagggacttgaacatcatggactttagtatcctagggggttcttggaacccatcacccataggggcaccataggacaactatagtaccgtgtttatttcctattaattcaggttccgtttagagtctaaaactaaaacctaatcatttagtcacagtgtaaaaacaaatggaaataacagctcaaatcttcaaaatattactatagcattatgtttaaaataatctacaacaaaaatgtaccattttcaagcagtactacattaggagcccttttatagaaaataatttcttctttacccccgttccagtgtgaatctagtattctgttaacatttgtgtggcatttggagtttgtcatccccattgaagggagagccttctcagacatgaagcaagggaaacatactgaatagttttacacaaatttgatctggcttccatttgtccccctcatttcccaaatgtttaaatgtattggatttggattctcaatgtataagttgccttatctgttaatgtctatcttctgtctctttaattttgtatatctgctgttttgcttttggatacattttctaattagaagtcacatgataaatataatcagtatagtaataataccataatgtgcacatactcaataaataaatgactgcattgttgtaaatgag

SEQ ID NO: 587 - DNA, 5366 bp, Artificial Sequence
  CLEC2D
agatcactcatagaaactggaggcaaaatgcatgacagtaacaatgtggagaaagacattacaccatctgaattgcctgcaaacccaggttgtctgcattcaaaagagcattctattaaagctaccttaatttggcgcttatttttcttaatcatgtttctgacaatcatagtgtgtggaatggttgctgctttaagcgcaataagagctaactgccatcaagagccatcagtatgtcttcaagctgcatgcccagaaagctggattggttttcaaagaaagtgtttctatttttctgatgacaccaagaactggacatcaagtcagaggttttgtgactcacaagatgctgatcttgctcaggttgaaagcttccaggaactgaatttcctgttgagatataaaggcccatctgatcactggattgggctgagcagagaacaaggccaaccatggaaatggataaatggtactgaatggacaagacagttagtcatgaaagaagatggtgccaacttgtatgttgcaaaggtttcacaagttcctcgaatgaatccaagacctgtcatggtttcctatcctgggagcaggagagtgtgcctatttgaatgacaaaggtgccagtagtgccaggcactacacagagaggaagtggatttgttccaaatcagatatacatgtctagatgttacagcaaagccccaactaatctttagaagcatattggaactgataactccattttaaaatgagcaaagaatttatttcttataccaacaggtatatgaaaatatgctcaatatcactaataactgggaaaatacaaatcaaaatcatagtaaaatattacctgttttcatggtgctaatattacctgttctcccactgctaatgacatacccgagactgagtaatttataaataaaagagatttaattgactcatagttccacatggctggggaggtcttgcaatcatgacagaaggcaaatgggaagcaaagtcatgtcttatgtggtggcaggcagggggacttgtgcacaggaactcctatttatacaaccatcagatatcttgagacaagaacagtatggggctccctggtgtgattccgtcctgcgcggctgttctctggagcagcattcatttatcttcgtctgccttgtctcctacctaagtgtgtgtcgccacccgatggaagattcgatggacatggacatgagccccctgaggccccagaactatcttttcagttgtgaactaaaggccgacaaagatgatcactttaaggtggataatgatgaaaatgagaccagttatctttaagaacggtcagctcaggggctggtgcaaaggatgaactgcacattgttgaagcagaggccatgaatgacgaaggcagtccaattaaagtaacactggcaactttgaaaatgtctgtacagccaacggtttctcttgggggctttgaaataacaccaccagtggacttaaggttgaagtgtggttcagggccagtgcatattagtggacagcacttagtagctgtgaaggaaggtgcagagtcagaagatgaagaagaggaggatgtgaaactcttaagtatatctggaaagcagtctgcccctggaggtgggcagaaaaaagtaaaacttgctgctgctgctgatgatgatgatgatgaagatgatgatgatgatgatgacgaggaagctgaagaaaaagcgccagtgaagaaatctatacgagatactccagccaaaaatgcacaaaagtcaaatcagaatggaaaagactcaaaaccatcatcaacaccaagatcaaaaggacaagaatccttcaaaaaacaggaaaaatctcctaaaacaccaaaaggatctagttctgtagaagacattaaagcaaaaatgcaagcaagtatagaaaaacgtggttctcttcccaaagtggaaaccaagttcatcaattatgtgaagaatttcttctggatgactgaccaagaggctattcaagatctctggcagtggaggaagtctctttaagaaaatagtttaaacaatttgttaaaaattttccatcttatttcatttctgtaacagttgatatctggctgtcctttttatagtgcagagtgagaactttccctaccatgtttgataaatgttgtccaggttctattgccaagaatgtgttgtccaaaatgcctgtttagtttttaaagatggaactccaccctttgcttggttttaagtatgtatgggatgctatgataggacatagtagtagcagtggtcagacatggaaatggtggggagacaaaagtatacacgtgaaataaaactcagtattttaataaagtaaaaaaaaaaaaaaaggtatggggaaaactgcccccataaagcaattgtctccacctggccctgccctttgcatgtggagattattacaattcaaggtgaaatttgggtggagacacaaccaaaccatatcagatggctatatcaaaaagacaagaaataacaagcattggtgagagtgtggagaagacggaacccttgtacacagttggtgggaacacagtttggtgcagccattatagaaaacgtcatggaggttcctaaagaaattaaaaagagaactaccatatgagccagcaatcccttttccagatatacacccaaaggaaatgaaatcaccacctcataaagatatctgctttcctgtttattataacacatctttattcataatagccaagatacggaactaactgaagtgaccattaacagatgaatggataaagaaattgtcatatatataaaacacacacattatatacatacatacatatatatatatatataaaaaatagaatattattcagccttgtaaaaagaaatcctgttatgttgggaacaagccccccaaaatctggccataaactcaccccaaaactggccataaacaaaatctctgcagcactgtgacatgttagtgatggccataacacccacgctggaaggttgtgggtttatgggaatgagggcaaggaacacctggcctgcccagggtggaaaaccacttaaaggcgttcttaagctacaaacaatagcatgagcgatctgtgccttaaggacatgttcctgctgcagttaactagcccaatctattcctttaattcggcccatcccttcatttcccataagggatacttttagttaatttaatatctatagaaacaatgctaatgactggcttgctgttaataaatacatgggtaaatctctgttctgggctctcagctctgaaggctgtgagacccctgatttcccacttcacacctctatatttctgtgtgtgtgtctttagttcctctggcgctgctgggttaggatctacccgactgagctggtctcagcactgttatttgaaacaatgtaaataaacctatagggtttattatatatactaagtgaaataagccagacacagaaaaaaaatgttgcatgatctcacttatagtgaaacttaaaaaaaaaacccaaatacatagaaatagagtagaatggtggttaccagagatgaggaaaatacagagacacaggtcaaaagatacagagttgcagttacaaagggtgagtatgtctagatatctaacatacagtatgaggactataatagtattgcactgtgtactgaaaacttgatgacagattttagatattcttaccacacagacaaaaagaaatgtaagtatgtgagatgaagcttatgttaattagattaagtgtatgtacataaaaacatcacattatacacatcaaatatatacaataaaaaagcacattgggagatacatgataaatttctatctgcagttgctatttgcatttttaaaggatatttttattttttaaatttttagctgacaactgtataattatggaatacaatgtgatgttctgatatatgtgtacactatggaatgattaaatcaaactaacatttcatcatctcacatacttatcattttctgtggtgagaacatttgaaatttattctcttgacaattttgaaagatccaatacactattattaactatagtcactatgctgtgcaatagatctcaaaagcttattcctcttaactgaaacctactaccctgtgacatgtggggaacatctctctattccccagccccagtccctaaatgttgaatacacaatggggaaaaaatagtcttcaatgaatggtggtgggaaaattgtatatccacatgcagaagaataaaattggacccttacctcctaccatatataaaaaccaactgaaaatcgattaaagacttaaactgtaaaactactaaaagaaaatatagggagaaagcttcacaacgttggtctgggcaataatttttggatttgacctcaaaagtagatgcaaccacagtgaaaataaacaaatgaaattgcataaaataaaaaatgtttctgcacagcaaaggaaataattaatggagtaaagagacaacttacagattgggagaatatatttccaaactattgttggggctcagaaacggataccctaacatatagtgatttgacaggtggaactaaagaagactcgaggtctctctgacctcctcctcaacctctgtttcttaatcctctgttttcccagagcacaggaggaagttctctgaagttcctttatctgctttaagttcagactcaccaaataagaaaacagttaattctggtgccttccatgggttttcattaactgaagtcatattgtaggaaaaagaatgaagtctcttaacccacctggatagatttttctcacaaaccattgtcttctctgcaagcccagtagactttgtcccaggccatttatgtgatcttcaccccattaagttctccccaaattatttactcttcccccaaaatcacccacacttccccatctccctctcccctaaggacaagggtatatcaccatctataccccattgcttggtggggtgatcactctgattctctgcatgcatttttatagatttgtttgccatttatcctattaatctgcattctgtcaattgtggcaagttatcagcatattttttaacttttaattattcttaatggaaagacacttctgtatacactggaaatctcaggaaatttcttttttccttaagcttaattgaaatgtttacttttcagtaaaatttcaagcttgagtaatgttcatgcctgcttttcattgaaatagaatgaaaaggttgcacaatattattttcatgaaattacttctagtataattctgaataaacactttgaaaggcagtgaactgtaaata

SEQ ID NO: 588 - DNA, 4169 bp, Artificial Sequence
  G6PC
atagcagagcaatcaccaccaagcctggaataactgcaagggctctgctgacatcttcctgaggtgccaaggaaatgaggatggaggaaggaatgaatgttctccatgactttgggatccagtcaacacattacctccaggtgaattaccaagactcccaggactggttcatcttggtgtccgtgatcgcagacctcaggaatgccttctacgtcctcttccccatctggttccatcttcaggaagctgtgggcattaaactcctttgggtagctgtgattggagactggctcaacctcgtctttaagtggattctctttggacagcgtccatactggtgggttttggatactgactactacagcaacacttccgtgcccctgataaagcagttccctgtaacctgtgagactggaccagggagcccctctggccatgccatgggcacagcaggtgtatactacgtgatggtcacatctactctttccatctttcagggaaagataaagccgacctacagatttcggtgcttgaatgtcattttgtggttgggattctgggctgtgcagctgaatgtctgtctgtcacgaatctaccttgctgctcattttcctcatcaagttgttgctggagtcctgtcaggcattgctgttgcagaaactttcagccacatccacagcatctataatgccagcctcaagaaatattttctcattaccttcttcctgttcagcttcgccatcggattttatctgctgctcaagggactgggtgtagacctcctgtggactctggagaaagcccagaggtggtgcgagcagccagaatgggtccacattgacaccacaccctttgccagcctcctcaagaacctgggcacgctctttggcctggggctggctctcaactccagcatgtacagggagagctgcaaggggaaactcagcaagtggctcccattccgcctcagctctattgtagcctccctcgtcctcctgcacgtctttgactccttgaaacccccatcccaagtcgagctggtcttctacgtcttgtccttctgcaagagtgcggtagtgcccctggcatccgtcagtgtcatcccctactgcctcgcccaggtcctgggccagccgcacaagaagtcgttgtaagagatgtggagtcttcggtgtttaaagtcaacaaccatgccagggattgaggaggactactatttgaagcaatgggcactggtatttggagcaagtgacatgccatccattctgccgtcgtggaattaaatcacggatggcagattggagggtcgcctggcttattcccatgtgtgactccagcctgccctcagcacagactctttcagatggaggtgccatatcacgtacaccatatgcaagtttcccgccaggaggtcctcctctctctacttgaatactctcacaagtagggagctcactcccactggaacagcccattttatctttgaatggtcttctgccagcccattttgaggccagaggtgctgtcagctcaggtggtcctcttttacaatcctaatcatattgggtaatgtttttgaaaagctaatgaagctattgagaaagacctgttgctagaagttgggttgttctggattttcccctgaagacttacttattcttccgtcacatatacaaaagcaagacttccaggtagggccagctcacaagcccaggctggagatcctaactgagaattttctacctgtgttcattcttaccgagaaaaggagaaaggagctctgaatctgataggaaaagaaggctgcctaaggaggagtttttagtatgtggcgtatcatgcaagtgctatgccaagccatgtctaaatggctttaattatatagtaatgcactctcagtaatgggggaccagcttaagtataattaatagatggttagtggggtaattctgcttctagtattttttttactgtgcatacatgttcatcgtatttccttggatttctgaatggctgcagtgacccagatattgcactaggtcaaaacattcaggtatagctgacatctcctctatcacattacatcatcctccttataagcccagctctgctttttccagattcttccactggctccacatccaccccactggatcttcagaaggctagagggcgactctggtggtgcttttgtatgtttcaattaggctctgaaatcttgggcaaaatgacaaggggagggccaggattcctctctcaggtcactccagtgttacttttaattcctagagggtaaatatgactcctttctctatcccaagccaaccaagagcacattcttaaaggaaaagtcaacatcttctctctttttttttttttttgagacagggtctcactatgttgcccaggctgctcttgaattcctgggctcaagcagtcctcccaccctaccacagcgtcccgcgtagctgggactacaggtgcaagccactatgtccagctagccaactcctccttgcctgcttttctttttttttctttttttgagacggcgcacctatcacccaggctggagtggagtggcacgatcttggctcactgcaacctcttcctcctggttcaagcgattctcatgtctcagcctcctcagtagctaggactaccggcgtgcaccaccatgccaggctaatttttatatttttagaattttagaagagatgggatttcatcatgttggccaggctggtctcgaactcctgacctcaagtgatccacctgccttggcctcccaaggtgctaggattacaggcatgagccaccgcaccgggccctccttgcctgtttttcaatctcatctgatatgcagagtatttctgccccacccacctaccccccaaaaaaagctgaagcctatttatttgaaagtccttgtttttgctactaattatatagtataccatacattatcattcaaaacaaccatcctgctcataacatctttgaaaagaaaaatatatatgtgcagtattttattaaagcaacattttatttaagaataaagtcttgttaattactatattttagatgcaatgtgatctgaagtttctaattctggcccaactaaatttctagctctgtttccctaaacaaataatttggtttctctgtgcctgcattttccctttggagaagaaaagtgctctctcttgagttgaccgagagtcccattagggatagggagacttaaatgcatccacaggggcacaggcagagttgagcacataaacggaggcccaaaatcagcatagaaccagaaagattcagagttggccaagaatgaacattggctaccagaccacaagtcagcatgagttgctctatggcatcaaattgcaacttgagagtagatgggcagggtcactatcaaattaagcaatcagggcacacaagttgcagtaacacaacaagactaggccagctctggaatccagtaactcagtgtcagcaaggttttgggttatagttcaagaaagtctaaacagagccagtcacagcaccaaggaatgctcaagggagctattgcaggtttctctgctaagagatttatttcatcctgggtgcagggttcgacctccaaaggcctcaaatcatcaccgtatcaatggatttcctgagggtaagctccgctatttcacacctgaactccggagtctgtatattcagggaagattgcattctcctactggatttgggctctcagagggcgttgtgggaaccaggcccctcacagaatcaaatggtcccaaccagggagaaagaaaatagtcttttttttttttttaatagagatgggggtctcactatgctgcccaggctggtcttgaactcctgggttcaagtgatcctcctgcctcagcctcccaaagtgctgggattacagtgtgagccactgcgcttggccagaaatggttttgatctgtctgaactgaaccctactgcttaggcatagccccatccttgataatctatttgctcccaaggaccaagtccaagatccttacaagaaaggtctgccagaaagtaaatactgcccccactccctgaagtttatgaggttgataagaaaacataacagataaagtttattgagtgctaactttaaaaaaaaa

SEQ ID NO: 589 - DNA, 1201 bp, Artificial Sequence
  C6orf58
agctctggcacaatggcttttcttccttcctgggtttgtgtactagttggttccttttctgcttccttagcagggacttccaatctctcagagacagagccccctctgtggaaggagagtcctggtcagctcagtgactacagggtggagaacagcatgtacattattaatccctgggtataccttgagagaatggggatgtataaaatcatattgaatcagacagccaggtattttgcaaaatttgcaccagataatgaacagaatattttatgggggttgcctctgcagtatggctggcaatataggacaggcagattagctgatccaacccgaaggacaaactgtggctatgaatctggagatcatatgtgcatctctgtggacagttggtgggctgatttgaattattttctgtcttcattaccctttcttgctgcggttgattctggtgtaatggggatatcatcagaccaagtcaggcttttgcccccacccaagaatgagaggaagttttgttatgatgtttctagctgtcgttcatccttccctgagacaatgaacaagtggaacaccttttaccagtatttgcagtcaccttttagtaagtttgatgatctgttgaagtacttatgggctgcacacacttcaaccttggcagataatatcaaaagttttgaagacagatatgattattattctaaagcagaagcgcattttgagagaagttgggtactggctgtggatcatttagctgcagtcctctttcctacaaccttgattagatcatataagttccagaagggcatgccaccacgaattcttcttaatactgatgtagcccctttcatcagtgactttactgcttttcagaatgtagtcctggttcttctaaatatgcttgacaatgtggataaatctataggttatctttgtacagaaaaatctaatgtatatagagatcattcggaatctagctctagaagttatggaaataactcctgaaacatttaacttcaaacttcaggaaatgattaatgaattaaaaatgaaaaactcgaacttgacaatcagtaatttcaaaaaattaatgtcatcatgaccatgtagtttattctttctgatatttttgatttatgcttatttgttaagatcttgtacatgtattaaaaacttaaattaaatgcattcaagttaaaat

SEQ ID NO: 590 - DNA, 6088 bp, Artificial Sequence
  DNAJB14
gtccgcccgggccgtcgcagccgctgccgcggtcccctgcgctcctccccgctgccgccgcacgcccccagccggtcccgcctcgcctcctccgcggcggcggcttccgcccttcttagctgcgctgccggaggaaacggaagaaggagcaagctatggaggggaacagggatgaggctgagaaatgtgtcgagatcgcccgggaggccctgaacgccggcaaccgcgagaaggcccagcgcttcctgcagaaggccgagaagctctacccactgccctcggcccgcgcactattggaaataattatgaaaaatggaagcacggctggaaatagccctcattgccgaaaaccatcaggtagtggcgatcaaagcaagcctaattgcacaaaggacagcacatctggtagtggtgaaggtggaaaaggctataccaaagaccaagtagatggagttctcagcataaacaaatgtaaaaattactatgaagtacttggagttacgaaagatgctggtgatgaagatttgaaaaaagcttatagaaagcttgctttgaagtttcatccagacaaaaaccatgcacctggagcaacagatgcttttaaaaagattggaaatgcttatgctgttttaagtaatccagaaaagcgaaaacagtatgacctcacgggcaatgaagaacaagcatgtaaccaccaaaacaatggcagatttaatttccatagaggttgtgaagctgatataactccagaagacttgtttaatatattttttgggggtggatttccttcaggtagtgtacattctttttcaaatggaagagctggttatagccaacaacatcagcatcgacatagtggacatgaaagagaagaggaaagaggagatggaggtttttctgtgtttatccagctgatgcccataattgtattgatcctcgtgtcattattaagccagttgatggtctctaatcctccttattccttatatcccagatctggaactgggcaaactattaaaatgcaaacagaaaacttgggtgttgtttattatgtcaacaaggacttcaaaaatgaatataaaggaatgttattacaaaaggtagaaaagagtgtggaggaagattatgtgactaatattcgaaataactgctggaaagaaagacaacaaaaaacagatatgcagtatgcagcaaaagtataccgtgatgatcgactccgaaggaaggcagatgccttgagcatggacaactgtaaagaattagagcggcttaccagtctttataaaggaggatgaactggaatttttatttataccttttagcgtactctttattttttctgtaagtaagtttggtttcatcatgagggatgaaggaaaagatttgatactgaaaactaaactgaatagttggttcctgaaatcttggactgtttatgacctactggctcctttaaatagtaactgaaaactaaaatggaatattttagttaacgcttctacaagtattttcattttaaaagcttacatgattcctaactaaagtgtcatgagaaaggattatcacacctgtagcaatttccagttttagtgattctccattttttcccttgtcatgtaaatatttatggaatgatcattttgtgtacatacaggttactgcttttttatttaaattcttttagtgtttagctccatgagacacttcagtttaaattgatggaataaatgttatatgacacatttacattttccttatcaaggtgtcaaatatgtggactttaaacaatgaaactttttcaaaaagaaaaaacaaaaactttaactttgtgtaaaatcttatagtattatcagcttagagggaattgatatttttaatattgccgttatattccaaaatatatattgagataaatgaactggtgtagaatatcagtttgctatttagttttatgaattactatacatatacatgcatagaaatgaaatgctatactgataaattttaaagaaaatatgaggaaatggctataaatattaaactaaaagggtcttcaacagtaaagtgcagttatgtcatttaaaattccaatactttaaaggccaccaaattttgatgtatatgtccttgaagggctgctaaaatttatgaagaggactcacattttcccccatagaaatttgcagtttcttggtgatcatttaagcaggatccaaagaagttcctttacaaataagtaataagaaaaatgagtactaaaatacagctttgtgccttttaaccctatgccaactcctaaacatataagtagattacagtatacttatctgatcagagcatgatctgtttggccacatgcaagtgtgagcagaaatagagcagcacgtagaatagtaacttaaagcaagtcatcctttaaaaattctgagctaaaatctatttaccattgagtaattgaattaatcccataggaataagctccttgtaagtaaatccatgatatgaattagaaaaaaaaaacagctggaaattgaagtttttgatgcctgtatactggatatgaaactatttgatttctagtcttctgtgtttagcagttgtaatattttaatgattttgcttcatactcggttaatggaacataaacatatctttgatacttctttgtgagtgagagaatgctagatagggtggctttgttctttgtttaagttttttttcctgaatgtagttaatttatggcatctgttgaataaaactgctaaaatgacctcttaaaaatgttctgttgtatccccttttccaggtgaatcaatagaaatgcctgattgaattagtaggttaaactaaacaacatactgtcataggaaaactggagagcttaaccaacttgctcttagaaatgttaccttaaaaaaaaaaaaaaagcagtgcttaagagaaaatacaattttaattattttgttgagcctgcagagtaagtttttaaaaatataagttcatagcattttaattaactttgaaagttcatatgcatcagaaaatttatgaaaatttgaatgaaaaaaatttcatctatttatttttctaattttaatggcaaatttacactattatggctgataattctgtgaacttaccttcttgttgactgattctttttcccttaatcccagctttaaggagataggtgaagttattgtacaaagttaagtgataccataaagtatatattataaagtcatacatggcttttggacagtattatatttcagttgcagtgctgcattccattaaatttcataaaatgctagggaaaatgtgtttgataaaattttctgcagtgagaaatgacagactgagtgcctgacaatttaagccacatatgaagtatgcaagtaaagattcagtccttaatgtcatctatatcatggtataaaagctcaacaagtatcttataatttggagttaactttataaagtaagaagagtttggatatcttgataaaagattttcatgtttgctgctttttttataataaaaatcccaacattttgccatcttatgtttagctacatgaacttcgcaatttcatcggctcattctaatgaccacctaaaagtcctcaatctttgaatattgctttattagctcctctaactggtattctaacagtttagcagcacttatatttattaatgctttacatttttacccctttttgtgtaaacacaaatacacccatgcatatacacacaaacattattgtccttgtgagggtttgggggaaatgaaaaatagtacctttctcctcttcttttgattccttagttcccaaatagactggtgctagtcatttagtcatctgtaaatttcgaaatgtagtttgattaaatgtgaactgaattctcagcaatgaaaaatgtcaagttgaattcatctaataagtgaaaataatatattttgtaaacagattacatttgaacacctaaataagtatttgtttcataatcattacatgcttgtttatgatttacaaagatttggtagagaaaagtacagtccttaaggcatatatatgccaatgcattaaactactcagcttttgtgccagctcaggtgttcataggaacaggaatgtggaataccagctttttactttaattatacttttatgctgaatttttcttccagttaaacctttaattacactagtatgtaaagtagttactgagaaaaataagtttttgatttcccttctgttgatctgtaacatttttaaatgaagctatttaacacatgacatgctaatgttacttaatggattcctatgtatttcattaaaaaaaagtctcccacctgtgttaagacagctaaatatttcttgatgttggcttgaggaccaagtgagccatcttgccagttaagcaagttttatatcagaggaccaaatggttaagaagagaatttgtacatttcttgagcttccccatgtgaagcttgggttcagtactatcctattactatccatcttcataatgagtgaagcaaactgaaagggaattcataatcttttttcttatctgaacagaaaaactaatgaaaatcaacaataaatctttattttaattttcattcaacagctgaaaaaccatgtctgttgaccacattggaccattgcctagttaaaatccataaaattccctataaaccaatgaaaagaaacttgtctggcaataatttccaacattttaaattctaatttttagttacaaagaaaaaggatagaatgaggcttttcaaggaattcttgctcatcccttcaattatttggcaggtaaaacagtcctagaattcagcttcctttttggttttattactattaaatagatactttcatataaatggaaacacttttcctcaaaacattaattcaaaacatactccttatattaaggattatagcaccatattttttgtatattccctatgtgtaactttttcctgttggtatgtgatatttttcatttaatatgactatctgctggtgttggggccaatagatttgtgaatattctgtggatgtgtctatgtataggtgtatatatatatatatatatttttttttttttttcccagctaattacctcaaatgtgtgattgtttaatatataccacactatgtttgcacagagcagggcttccattagcagtggatatttttatgtctgactttgaaaatcagtcaacacaatttcattggtgtgaattatttgttgctctttttcatattttaatggagagattcctattataaggcccatgcttcaaacataattatatctttctatatccagccatctggaaatacataggggtaagaagtatttcttgaaatgtccttgtttagtaagttagtaaaaactgggatgactagttgccaagatgtcttgtaactgcatagcagatgacacctggcatggcaagtctcattcacttcagcacaacactctgtacatttcagtctgatattctactttgccatttaaggacaccattaaaatcatagagattttcagtgacattggagtattgtaattattactttcaaaaaattatttttaataggatgattaaaccaatgagaagaaacacacataaatgatattttgcagtttatctgtattaagaaatgcttcttgccaatttctagttttagtttttggattgctacataagactttctttccatttactttatgtgtttttaaaagctgcaggtaatttttaaggtttgatggaattataatggaagccttgtataagttaaatgaaattggtaaaggagagcttactttgtctataatgcattcaggattaaaaattagatttcaaaatgaaatgtctgatttgtaaaatatttaatgttatatcagacttacataaaattttctgtgagaactcaaatgcatttgatttttaatgaatgttctgaatgaaatatgaatttttgtctttcagtctctgtagtttatctcaatatattaataaaaaggtctgttctcactgtaaaaaaaaaaaaaaaaa

SEQ ID NO: 591 - DNA, 2707 bp, Artificial Sequence
  ADH1B
acaagcaaacaaaataaatatctgtgcaatatatctgctttatgcactcaagcagagaagaaatccacaaagactcacagtctgctggtgggcagagaagacagaaacgacatgagcacagcaggaaaagtaatcaaatgcaaagcagctgtgctatgggaggtaaagaaacccttttccattgaggatgtggaggttgcacctcctaaggcttatgaagttcgcattaagatggtggctgtaggaatctgtcacacagatgaccacgtggttagtggcaacctggtgaccccccttcctgtgattttaggccatgaggcagccggcatcgtggagagtgttggagaaggggtgactacagtcaaaccaggtgataaagtcatcccgctctttactcctcagtgtggaaaatgcagagtttgtaaaaacccggagagcaactactgcttgaaaaatgatctaggcaatcctcgggggaccctgcaggatggcaccaggaggttcacctgcagggggaagcccattcaccacttccttggcaccagcaccttctcccagtacacggtggtggatgagaatgcagtggccaaaattgatgcagcctcgcccctggagaaagtctgcctcattggctgtggattctcgactggttatgggtctgcagttaacgttgccaaggtcaccccaggctctacctgtgctgtgtttggcctgggaggggtcggcctatctgctgttatgggctgtaaagcagctggagcagccagaatcattgcggtggacatcaacaaggacaaatttgcaaaggccaaagagttgggtgccactgaatgcatcaaccctcaagactacaagaaacccattcaggaagtgctaaaggaaatgactgatggaggtgtggatttttcgtttgaagtcatcggtcggcttgacaccatgatggcttccctgttatgttgtcatgaggcatgtggcacaagcgtcatcgtaggggtacctcctgcttcccagaacctctcaataaaccctatgctgctactgactggacgcacctggaagggggctgtttatggtggctttaagagtaaagaaggtatcccaaaacttgtggctgattttatggctaagaagttttcactggatgcgttaataacccatgttttaccttttgaaaaaataaatgaaggatttgacctgcttcactctgggaaaagtatccgtaccgtcctgacgttttgaggcaatagagatgccttcccctgtagcagtcttcagcctcctctaccctacaagatctggagcaacagctaggaaatatcattaattcagctcttcagagatgttatcaataaattacacatgggggctttccaaagaaatggaaattgatgggaaattatttttcaggaaaatttaaaattcaagtgagaagtaaataaagtgttgaacatcagctggggaattgaagccaacaaaccttccttcttaaccattctactgtgtcacctttgccattgaggaaaaatattcctgtgacttcttgcatttttggtatcttcataatctttagtcatcgaatcccagtggaggggacccttttacttgccctgaacatacacatgctgggccattgtgattgaagtcttctaactctgtctcagttttcactgtcgacattttcctttttctaataaaaatgtaccaaatccctggggtaaaagctagggtaaggtaaaggatagactcacatttacaagtagtgaaggtccaagagttctaaatacaggaaatttcttaggaactcaaataaaatgccccacattttactacagtaaatggcagtgtttttatgacttttatactatttctttatggtcgatatacaattgattttttaaaataatagcagatttcttgcttcatatgacaaagcctcaattactaattgtaaaaactgaactattcccagaatcatgttcaaaaaatctgtaatttttgctgatgaaagtgcttcattgactaaacagtattagtttgtggctataaatgattatttagatgatgactgaaaatgtgtataaagtaattaaaagtaatatggtggctttaagtgtagagatgggatggcaaatgctgtgaatgcagaatgtaaaattggtaactaagaaatggcacaaacaccttaagcaatatattttcctagtagatatatatatacacatacatatatacacatatacaaatgtatatttttgcaaaattgttttcaatctagaacttttctattaactaccatgtcttaaaatcaagtctataatcctagcattagtttaatattttgaatatgtaaagacctgtgttaatgctttgttaatgcttttcccactctcatttgttaatgctttcccactctcaggggaaggatttgcattttgagctttatctctaaatgtgacatgcaaagattattcctggtaaaggaggtagctgtctccaaaaatgctattgttgcaatatctacattctatttcatattatgaaagaccttagacataaagtaaaatagtttatcatttactgtgtgatcttcagtaagtctctcaggctctctgagcttgttcatcctttgttttgaaaaaattactcaaccaatccattacagcttaaccaagattaaatgggatgatgttaaaaaaaaaaaaaaaaa

SEQ ID NO: 592 - DNA, 3297 bp, Artificial Sequence
  DNM1
gggcgggggccccgcggcgcaggcagtctgggcgcgcggctgcagcggcggagccggagtcggagccgggagcgctagcggcagccggatcgcagcctgcggggcccgccgcagccatgggcaaccgcggcatggaagatctcatcccgctggtcaaccggctgcaagacgccttctctgccatcggccagaacgcggacctcgacctgccgcagatcgctgtggtgggcggccagagcgccggcaagagctcggtgctcgagaatttcgtaggcagggacttcttgcctcgaggatctggcattgtcacccgacgtcccctggtcttgcagctggtcaatgcaaccacagaatatgccgagttcctgcactgcaagggaaagaaattcaccgacttcgaggaggtgcgccttgagatcgaggccgagaccgacagggtcaccggcaccaacaagggcatctcgccggtgcctatcaacctccgcgtctactcgccgcacgtgctgaacctgaccctggtggacctgcccggaatgaccaaggtcccggtgggggaccaacctcccgacatcgagttccagatccgagacatgcttatgcagtttgtcaccaaggagaactgcctcatcctggccgtgtcccccgccaactctgacctggccaattctgacgccctcaaggtcgccaaggaggtggacccccagggccagcgcaccatcggggtcatcaccaagctggacctgatggacgagggcacagatgcccgtgatgtgctggagaacaagctgctccccctgcgcagaggctacattggagtggtgaaccggagccagaaggacattgatggcaagaaggacattaccgccgccttggctgctgaacgaaagttcttcctctcccatccatcttatcgccacttggctgaccgtatgggcacgccctacctgcagaaggtcctcaatcagcaactgacgaaccacatccgggacacactgccggggctgcggaacaagctgcagagccagctactgtccattgagaaggaggtggaggaatacaagaacttccgccctgatgacccagctcgcaagaccaaggccctgctgcagatggtccagcagttcgccgtagactttgagaagcgcattgagggctcaggagatcagatcgacacctacgaactgtcagggggagcccgcattaaccgaatcttccacgagcgcttccctttcgagctggtcaagatggagtttgatgagaaggaactccgaagggagatcagctatgctatcaagaatatccatggcattagaacggggctgtttaccccagacatggcctttgagaccattgtgaaaaagcaggtgaagaagatccgagaaccgtgtctcaagtgtgtggacatggttatctcggagctaatcagcaccgttagacagtgcaccaagaagctccagcagtacccgcggctacgggaggagatggagcgcatcgtgaccacccacatccgggagcgcgagggccgcactaaggagcaggtcatgcttctcatcgatatcgagctggcttacatgaacaccaaccatgaggacttcataggctttgccaatgctcagcagaggagcaaccagatgaacaagaagaagacttcagggaaccaggatgagattctggtcatccgcaagggctggctgactatcaataatattggcatcatgaaagggggctccaaggagtactggtttgtgctgactgctgagaatctgtcctggtacaaggatgatgaggagaaagagaagaaatacatgctgtctgtggacaacctcaagctgcgggacgtggagaagggctttatgtcgagcaagcatatctttgccctctttaacacggagcagaggaatgtctacaaggattatcggcagctggagctagcctgtgagacacaggaggaggtggacagctggaaggcctccttcctgagggctggcgtgtaccctgagcgtgttggggacaaagagaaagccagcgagaccgaggagaatggctccgacagcttcatgcattccatggacccacagctggaacggcaagtggagaccatccggaatcttgtggactcatacatggccattgtcaacaagaccgtgagggacctcatgcccaagaccatcatgcacctcatgattaacaataccaaggagttcatcttctcggagctgctggccaacctgtactcgtgtggggaccagaacacgctgatggaggagtcggcggagcaggcacagcggcgcgacgagatgctgcgcatgtaccacgcactgaaggaggcgctcagcatcatcggcgacatcaacacgaccaccgtcagcacgcccatgcccccgcccgtggacgactcctggctgcaggtgcagagcgtaccggccggacgcaggtcgcccacgtccagccccacgccgcagcgccgagcccccgccgtgcccccagcccggcccgggtcgcggggccctgctcctgggcctccgcctgctgggtccgccctggggggggcgccccccgtgccctccaggccgggggcttcccctgaccctttcggccctccccctcaggtgccctcgcgccccaaccgcgccccgcccggggtccccagaatcactatcagtgacccctgaggagcgtcagccatgccgatcgggtcaggcaagtccatcccgtcctgagagccccaggccccccttcgacctctaaacagatccctcctcttctcggagacctccctttccaagcctgcctggacggctgttctgtgacttgacagtggctcccccagccccaaagccagcccccttcatctgtgacttaatctgttgtagtggtgagctgatacattcaggtgtgaccgttggtgaaaacttgtgccccttctgtggtatgcccttgccctgttctataaatatctataaatactcatatatatacacacctacacatggccaaccgcctcgcctctagcgctgggaatcagtcactgtgctatccttgtggagtcttgtggcccaactaccagagaacgctgtcccccgacatcccactccaaagtgtgccacctccagtgagcctccttgtcatgcccggcctgtggacagccagcccccgccatccctcccaccccctaccaagcatgggggtgctgtgcaggcagccgtgtggcctgacagtttctaccagtcctgctgtccctcggctgagaataaaacccatttctggatgatggggaatgtcaaaaaaaaaaaaaaa

SEQ ID NO: 593 - DNA, 4803 bp, Artificial Sequence
  DPP6
agttcagacagaaaacctggcgcgcgcgcgcgcacacacacacgcctcccctggcgtcgccgcccggccgggtccctgcccttagggaccagagcggcgaccgctgcaccccgcaccgcctgctggaggagcccccggagccggggccgagccgccggcgtccccgagtgcgccccctgtgcgtgccgccgcgctgttgctcgcagtgtgctggcgccgagctcggtggacacgcgcgcagtcagagctgcctctcgccctcgctagctgggctcgcagcctcttcctccctccctggctcctggctttttgtttaaagcaacacccaccctccatccaggctttttttctttctttctttattggtagcggccaaaaagagttgattgctattgggatccgctgagtaaagacacgggcaggggtgcgcggaggtgagaaaactgaagacctggaagatttttttttccttcaaaaacccgtttccatccagtcttcagccagtccagtctactttaatcctcaccaggacaatggattaagtttctcttccctggaccagaagtcgggttcggacttggggcaaaatgaaggaaaaggccatgatcaagaccgctaagatgcaggggaacgtgatggagctggtggggagtaaccctccgcagaggaattggaaaggaatagcaattgcactgcttgtcattctggtcatctgctccttgatcgtcacctcggtcatacttctgacaccagcggaagataatagtctgtctcaaaagaagaaggtcactgtagaagatctcttcagtgaagacttcaaaattcatgaccccgaggctaagtggataagtgatacagaattcatctacagagaacagaaaggaacagtgagactgtggaatgttgaaacaaatacttctactgtcttaatagaaggcaaaaaaattgaatcattaagagccatcagatatgaaatatctccagatagagagtatgcacttttttcatacaatgtggaacccatatatcaacactcgtatactggatattacgtcctgagcaaaattcctcatggggatcctcaaagtctggacccaccagaagtcagcaatgcaaaacttcagtatgcaggatggggccctaaaggccaacagctgatatttatttttgaaaacaatatctactactgtgcacatgtcgggaaacaggccatccgtgtggtctccactggcaaggaaggtgtgatttacaatggcctcagtgactggctgtatgaagaggagattttgaagacacacatcgcacactggtggtctccggatggcacgagactcgcctacgccgccatcaatgattcccgtgtccccatcatggagctcccaacttacaccggctccatctaccccaccgtgaagccctaccactatcccaaggctggaagtgagaaccccagcatttccctacacgttattggcttaaatggacccacccatgatctggagatgatgccgcctgatgatccacggatgagggagtactacatcaccatggtgaagtgggccaccagcaccaaggtcgccgtgacctggctgaaccgggcgcagaacgtgtccatcctcaccctctgcgacgccaccacgggggtctgcacgaagaaacacgaggatgaaagtgaggcctggctccacagacagaatgaagaacctgtgttctccaaggatggccgaaagtttttcttcatcagagccatcccccagggaggacgagggaaattctatcacatcacggtgtcctcgtcccagcccaacagcagcaacgacaacatccagtccatcacctccggggactgggacgtgaccaagatcctagcctacgatgagaaggggaataagatctacttcctgagcacggaggacctgcctcggagacgacaactctacagtgccaacacggtgggcaacttcaacaggcagtgcctctcctgtgacctggttgagaactgcacctacttcagcgcttccttcagccatagcatggacttcttcctgctcaagtgcgaaggtcctggtgttcctatggtgacggtgcacaacacaacagataagaaaaaaatgtttgacctagaaacaaatgaacatgtcaagaaggccataaatgaccgacagatgcctaaagtggaatacagggacattgagattgatgattacaacctgcccatgcagatactgaagccagcaaccttcaccgacaccacccactaccctctgctcctggtggtggatggcaccccaggcagccagagtgtggctgagaagttcgaggtgagctgggagacggtgatggtgagcagccacggcgcggtggtggtaaagtgtgacggccgtggcagcggcttccaagggaccaagctcctgcacgaagtgaggcggcggctgggcttgctggaggagaaggaccagatggaggccgtgcggacgatgctgaaggagcagtacattgacaggacgcgcgtggccgtgtttgggaaggattacggtggctacctgagcacctacatcctcccagcaaagggagaaaatcaaggccagacattcacctgcggctctgctctctctccaataacagacttcaaactctatgcctctgcgttttccgagaggtacttgggcctccatggacttgacaacagagcatacgagatgaccaaggtagcccatcgagtctccgcgctggaagaacagcagttcctgatcattcatcccactgccgatgaaaaaattcatttccagcacacagcagaactcattacacaactaattaggggaaaggctaattacagcttacagatttacccggacgaaagccattactttaccagctccagcctcaaacagcatctgtaccggtccatcatcaacttcttcgtggaatgcttcaggatccaggacaaactgctgacagtcacagcgaaagaggacgaggaggaggactaagctcaggtcgctctaagcacaaacgtggctctttctacaaccagatgcaaccgagggatttccctgccctccctcttccctcggaggggcggggcggggcggggccgggtgttccatagcatgtgtgtctcggatgcggaaggcagttttgcttgggaaacaagctccttccccggggtcatcactcacggcctccatggcaccagggacaacgctgtccccgcagcagcgcctcctcccggcgcccgagagaccggcacgccacggcccctcccccaaggaacagagcaaaggatggtggccgcaggccccacgcgagcccacaggacaccggcccctagattccagccaccaagcggaagcatgagacccgcccacactagcctctgtgttcccgttagggacatcacaccctgtctcacgtcgcagtgccatggacgcagcagttacagcaccattgttttagcagtgcgtgttcatatatgggcttgctacttcctgtaatgaggacgttcaacatggtgaggggctacaagaaaacgcttttctgtacagagtcttactgtagctacgctaatggttaacctgatagaattaactcgtatttttctatggttttaacctgatgctccactgtctccgtcatggggttgttttgctgtttggggttgggccttgtttccctttcctttctccagtccacgtgtagactttgcgcttgatgaagaagcagatcggaagtaactgctccctcctcaaggttgtcttcagacgtcttggggacgttcctaaacactgagggggaagacagccaatagcacccattaaaagaaatacctaaataaaacctctctcccactcagctatgctagggcttggctgtaggtgtgcactgtctatttacatccgtccttacaaccatccttgtcctccttggtaccgtatcaagctctttcccatgacatttggtttaaaaaaaaaaaaaaaaaaaaaaaaaaaacagaaaaaagacaaagcgtcaactccacccacaggcccgctgtgtgtgctcgggccacgggagtcctgagggttctgtgggcctgcgcgcatccctctcccatcgtgggggtggctccgtgaccttcctgccacgagcaggaggttgatgatgtgctacgttagccttgtaagatacacccccaccaaatgtgcagccggtgttcccagtgtatatttcattctcttgtatataaaggaagcaatgtgtgtcaggcctctgtgcagtcaacccagcctcctcccgccagtgctaaccccgtgttgagcctgcatgctgacactgtggccgatctggactctagaagtgctagtttgaaatatatccattactgtcatttccttttgagcttgtggacaagctgaatgtcaggactgacttcgccagctcccagccctgcgggggtgtccttggcatcccatcagcagaggagatgcgtccctgttgcattttggcgtttggggctttgggtttatccacatgagctctgaacgtccgttatagttagggtgattggaaggtctccatcactgggtgttttaaaggtgattcaccaccatttgtgaaaggaccaacgtgctgataaacaggaccgatccgagtgctacatgactgtgcgtttgctatttcaatgggcctgaacgactacaaagccagctaggtctggaaggggaagccagctctggccacgacatctggtcggagggaagtggggatgtggcatggtagcgtctgttcatccatggaataaaacattattttaccactcgg

SEQ ID NO: 594 - DNA, 7157 bp, Artificial Sequence
  NTRK2
actaattttctggagtttctgcccctgctctgcgtcagccctcacgtcacttcgccagcagtagcagaggcggcggcggcggctcccggaattgggttggagcaggagcctcgctggctgcttcgctcgcgctctacgcgctcagtccccggcggtagcaggagcctggacccaggcgccgccggcgggcgtgaggcgccggagcccggcctcgaggtgcataccggacccccattcgcatctaacaaggaatctgcgccccagagagtcccgggagcgccgccggtcggtgcccggcgcgccgggccatgcagcgacggccgccgcggagctccgagcagcggtagcgcccccctgtaaagcggttcgctatgccggggccactgtgaaccctgccgcctgccggaacactcttcgctccggaccagctcagcctctgataagctggactcggcacgcccgcaacaagcaccgaggagttaagagagccgcaagcgcagggaaggcctccccgcacgggtgggggaaagcggccggtgcagcgcggggacaggcactcgggctggcactggctgctagggatgtcgtcctggataaggtggcatggacccgccatggcgcggctctggggcttctgctggctggttgtgggcttctggagggccgctttcgcctgtcccacgtcctgcaaatgcagtgcctctcggatctggtgcagcgacccttctcctggcatcgtggcatttccgagattggagcctaacagtgtagatcctgagaacatcaccgaaattttcatcgcaaaccagaaaaggttagaaatcatcaacgaagatgatgttgaagcttatgtgggactgagaaatctgacaattgtggattctggattaaaatttgtggctcataaagcatttctgaaaaacagcaacctgcagcacatcaattttacccgaaacaaactgacgagtttgtctaggaaacatttccgtcaccttgacttgtctgaactgatcctggtgggcaatccatttacatgctcctgtgacattatgtggatcaagactctccaagaggctaaatccagtccagacactcaggatttgtactgcctgaatgaaagcagcaagaatattcccctggcaaacctgcagatacccaattgtggtttgccatctgcaaatctggccgcacctaacctcactgtggaggaaggaaagtctatcacattatcctgtagtgtggcaggtgatccggttcctaatatgtattgggatgttggtaacctggtttccaaacatatgaatgaaacaagccacacacagggctccttaaggataactaacatttcatccgatgacagtgggaagcagatctcttgtgtggcggaaaatcttgtaggagaagatcaagattctgtcaacctcactgtgcattttgcaccaactatcacatttctcgaatctccaacctcagaccaccactggtgcattccattcactgtgaaaggcaaccccaaaccagcgcttcagtggttctataacggggcaatattgaatgagtccaaatacatctgtactaaaatacatgttaccaatcacacggagtaccacggctgcctccagctggataatcccactcacatgaacaatggggactacactctaatagccaagaatgagtatgggaaggatgagaaacagatttctgctcacttcatgggctggcctggaattgacgatggtgcaaacccaaattatcctgatgtaatttatgaagattatggaactgcagcgaatgacatcggggacaccacgaacagaagtaatgaaatcccttccacagacgtcactgataaaaccggtcgggaacatctctcggtctatgctgtggtggtgattgcgtctgtggtgggattttgccttttggtaatgctgtttctgcttaagttggcaagacactccaagtttggcatgaaaggttttgttttgtttcataagatcccactggatgggtagctgaaataaaggaaaagacagagaaaggggctgtggtgcttgttggttgatgctgccatgtaagctggactcctgggactgctgttggcttatcccgggaagtgctgcttatctggggttttctggtagatgtgggcggtgtttggaggctgtactatatgaagcctgcatatactgtgagctgtgattggggaacaccaatgcagaggtaactctcaggcagctaagcagcacctcaagaaaacatgttaaattaatgcttctcttcttacagtagttcaaatacaaaactgaaatgaaatcccattggattgtacttctcttctgaaaagtgtgctttttgaccctactggacatttattgacttaattgcttctgtttattaaaattgacctgcaaagttaaaaaaaaattaaagttgagaacaggtataagtgcacactgaatagtctaatctacatgtaacacatattttagtgtgattttctatactctaatcagcactgaattcagagggtttgactttttcatctataacacagtgactaaaagagttaagggtatatataccatcactttgggacttggtagtattattaaaaggttatttccttcactgtcaataaaagtccaaatgtttagcttaggtctgagagtcaaacaatgttaaggattgtcttaaagttccttagccagcaaaacaaaacaaaacaaaacaaacaaatgaaaaacgtttaaaaagaagaagaagaaaaaaaacaagaacaagcagcaacagctgttttgttggggctatagatttaagttaggcatagtcaatttcagaataactaagagtggaatatatgcatatggtgaaattataaccttgcccttttttatttgccctctgcgatccacctgctttttagaagtctgccgagtgagaaggccacagtatctcatgctgtttgcattacagaactgcagcttttctactctgaaaaggcctgggagcagaatggctggcctgctgtgagcaggagaggagattctaagaaggatagtcccccctacaacatactgtcatactgctgggttttcatgggtaggaaagcttgtcctgaccccagcagcaaagaggtggcaggtcgctaatgaatatatgctttataatgtccttcttcattgctgagagggcagccttagagctgtggatttctgcatcccccctgagtctgacccatggacacctgtttcattcactttagcatcacagtgacctttgtatgctctgttcagtctgtgtcaggcagtatgcttgtcctgaagagaggtttggctatccccaccccaccccaccccaccctgttccttttttatcaggaggacttcagagccaggcctgcagcattttgtttgaaaacacaatcagctctgacagttagacatgcacacagacgccatagctggattggaaacattgatgttttaaaaatttattttttttggaaatagttgcacaaatgctgcaatttagctttaaggttctatagatttttaactagtccaacacagtcagaaacattgttttgaatcctctgtaaaccaaggcattaatcttaataaaccaggatccatttaggtaccacttgatataaaaaggatatccataatgaatattttatactgcatcctttacattagccactaaatacgttattgcttgatgaagacctttcacagaatcctatggattgcagcatttcacttggctacttcatacccatgccttaaagaggggcagtttctcaaaagcagaaacatgccgccagttctcaagttttcctcctaactccatttgaatgtaagggcagctggcccccaatgtggggaggtccgaacattttctgaattcccattttcttgttcgcggctaaatgacagtttctgtcattacttagattccgatctttcccaaaggtgttgatttacaaagaggccagctaatagcagaaatcatgaccctgaaagagagatgaaattcaagctgtgagccaggcaggagctcagtatggcaaaggttcttgagaatcagccatttggtacaaaaaagatttttaaagcttttatgttataccatggagccatagaaaggctatggattgtttaagaactattttaaagtgttccagacccaaaaaggaaaaataaaaaaaaaggaatatttgtacccaacagctagaaggattgcaaggtagatttttgttttaaaatggagagaagtggacagataaggccatttaatatatcaaagatcagttgacatctcctagggaatgatgaaaacagcaggctattagaaaattatttcatatagttctcgtgttcttttcttttttttaatccctgaagggatgatcagtaacatagcttctcttttctgtactctagaccaccccttttcatcattttgctttttatgtctcccataagaaatgtgctttttagagcttcctaatgcatgtgttgcattattgcagcattagaaaaggagaggtagcatttttgctgaaatcgggcctgtcactctccaataaaggttctggcacttcaatgccaggcaggtctcctaaatgaacagaatgatctgtgtgagccgatgcctgcccttccagaggggccactgtccccagccgcagccaactgtgtcccacaggaatgggagcctaggtttccaaatcttgtgattctttaggagaaacatgaaacctggatttcgtgtgaaatgtcccgattgttaaaaagttggctcaattatttttaaaacattttgtaagccaacaaaagtctgtgggctgccagtttattacttttgtcttaaaacatgatcattgttctctcacggtatccttctgtcttcccgttgcaaattcacttttctttcttcctgacattgccattgagggctttgttaccacaagctaagaaactgagtttaacagcccagttatctgcaacatgtcaattacctttgctcctctcctgtgattcccaccatgctgtgaccctcagctgtctccctttgctgggaattctgcaccaatgtctcccctcaacccattccctggttggtcctactcccgtgtggccagagacatcctagcaaatccttcctcctattatatctgacactaatttcttttcaacagcgctcatgtctcttggcccagtcaggtgctgccaggtttagataggaaagtacatgtcccattttcatgggtgcccttaatgtggtccacgtcctatatcttattatatttactcatggctcaatgggggcctccagagaccctctcaggctgctgagctagactaaggaatgcatccaccgtcatcacatgagacactgactctgtgacgacaaaagtacaaacagtctgaggctaagaaaggttcatctcacaacaggaaaaacaaatctcaacacacattagagataattgattcaggggttttctctcccagtctcccagcagggactgatttcatttctgacccactaggttttctttccagaaataggtagcaaggacaagaactaaacaatcccagccccacccagcaacacagaacacaggagtttgcttttggcttctcactctccaagtaaccctgaattaggcccagaatggctgaggcttggagcatctcctcagacagagcagaggcgacacctcttcaggggtgtgtggagtaaatagctcgaagagctgaagacagaaaaccagtttcacgccaggtgcgagagagagcataatggagggaagcccgctttctctctcctcttcttttctctttatttctttagagcacttgacttttttttctctctctctctagtattctaaactgaccccatgaccaactgagaatttatttttgtttcattggttgtttcacagaattagaacacacacgactttttattcctccattgcaaaatggaatcaagatactacacaagacctgtgctttcttcctttgcatgatttacacctccgcctgttttggtgctagctgtctagaacttctctcttggtttgaatctgattccttcacactacactagaagtttatttcatcttgttttgtctagactccagatacagagggacagctggactgaggacaagcaattccatctagcatagggtctctcagggttggtgcatccagccacatgggcagggccagtcacatctagtctatgtccccagagcccttggagttgcgcagcttagctgacttgactccaaggaaattagtacagaagtaaccactctattaagtgtgttctgctatgttcacatgcctgtagtacctgcaaaccatgccaggttcatctaaagacataggggaagattaaggactcttttggacagaccatgaattgaatttgctgccaggtgctgccagactgaatttggctgacagaactcccagcccaggaaagttccatgacaatgactgtcgcagaaggaaatttcccactaaagtcagtccattttcaagttttggtcttcagagacaaaagaacgtcccagccacctgattttgatggtgaggtaactctaagttgaattcaggctagtgttgcagtatagctttggcatgttcatgagtgagcacccagaatgtgttgaaccaacccccacccctaactactgactatgactgcagtgggtttttatggggaaaaaaagtgtgaaaagcaaaaagaaaggaacagagattttttatcacctttattgtaagacagtccatttatgaattgagtataaacacatacaaagtaacaagagattcctaagaaacgcaaatccttgagtttcacgcacttcatgttcaaccatttgctgtaatccagaggcagcctgtgaatcattctcatgccctgttttttttttttttttcctataatgttctgggtttaaaagccatcttttccacattttctgtaaataatggataatcattttaaaaatttttatttttagtgctgttttaacaatgtagatagatcataaatgtacttgctgaattcaatcatttttaacaagccaataaagtttgataattcatctccaaaaaaaaaaaaaa

SEQ ID NO: 595 - DNA, 4568 bp, Artificial Sequence
  RUFY3
gtacaggatgagagagagaagcctaattgctctcccagcatcagcagcatctataaagcatcctgggaattgcttgccctacgttcagagcagctggtcacatgagcctgaattttcagttcagttcattagtcagccattttggtcaacaccctgcttactgcgcacggccaatcctatgagaactcagcatcccagctcatctgagcagatcctggaagtgatttctgcagctcaggattttttttttaagctacattgaaaatataggtttattttttgttcaggtttttcttttatattttttttctgcacaaaggaggaggatttttcacttactcatatcgaggccagatttttaaagccagctaaggcagcatcagctgtgcgggatttaaagcctatagctcagctgaaaaaaaaggtggggggcagggaagggaagataaaaggagaggaagctgggagaagacaagcatcatcttattttgctatgtggtaggaactgtctataagatagtgtagaattgtttatcttgagcagtttgttcttaacctataaggtatttttccttttttttttttttaaacctcccccacccttttcctgaaagctttgtttcagagctttgtattgggtttttttggtgaggaggttgtatttatttttttggtgtgtgtgtgtgagtgtgtgtgtgtctgtgtgtgtgttgtggtcccagctgagtcatcatgtctgctctgacgcctccgaccgatatgccaacccccaccactgacaagatcacacaggctgccatggagaccatctacctttgcaaattccgagtgtccatggatggagaatggctctgcctgcgagagctggatgacatctcacttacacctgacccagagcctacccatgaagatcctaattatctcatggctaatgaacgcatgaacctcatgaacatggccaagctgagtatcaagggcttgattgaatcagctctgaacctggggaggactcttgactctgactatgcacctctccagcaattctttgtggtgatggagcactgtctgaaacatggcttgaaagctaaaaaaacttttctcggacaaaataaatccttctgggggcctctagaactggtagaaaagcttgttccagaagccgcagagataacagcaagtgttaaagatcttccaggacttaagacaccagtaggtagaggaagagcctggcttcgtttggcattaatgcaaaagaaactttcagaatatatgaaagctttgatcaataagaaagaacttctcagtgaattctacgaacccaatgccctcatgatggaagaagaaggagccataattgctggtctgttggtgggtctgaatgtcattgatgccaatttctgtatgaaaggagaagacttggactctcaggttggagttatagatttttcaatgtatctcaaggacgggaacagcagtaaaggtactgaaggagacggtcagattactgcaattctggaccagaagaactatgtagaagaactgaacagacatttgaatgctactgtaaacaaccttcaggcaaaagtagatgcattagaaaaatccaacactaaactgacagaggagcttgcagttgcaaacaacaggatcattaccttacaagaagaaatggaacgagttaaagaggaaagttcctacatactggaatccaatcggaagggtcccaagcaagacagaactgcagaagggcaagcactaagtgaagcaagaaagcatttaaaagaagagacacaattacgattggatgttgagaaagaactggagatgcagatcagcatgaggcaggagatggaattggctatgaagatgctggagaaggatgtctgtgagaagcaggatgccctggtatctcttcggcagcagctggatgacctcagagctctcaagcatgaacttgcctttaagctgcagagttcagacttaggagtaaaacagaaaagtgaactaaacagtcgcttggaagagaagactaatcagatggctgctaccattaaacaacttgaacaaagattgcgccaggctgagcgaagccgccaatctgctgagttggacaaccggctcttcaaacaggactttggagacaagatcaacagtctgcagctggaagtcgaggagctcaccaggcagcggaaccagcttgagttagaactaaaacaggaaaaagaaagaagattacaaaacgacaggagcatcccaggaaggggttcccagaagtcagaatccaagatggatgggaagcacaaaatgcaagaggaaaatgttaaactaaaaaagcccctggaagaaagccacaggctgcaaccccaccctatggatgaacaggatcagctgctgctctctgaaaagccacagttgtgtcagctatgccaggaagacggcagcctaacaaagaatgtgtgtaagaactgcagcggaaccttctgtgatgcctgttcaacaaatgaactgcctcttccttcaagtatcaagcttgagcgagtttgcaatccctgtcacaagcatctgatgaagcaatattctaccagcccatcataagactggaggccaagacctggaccaaaacgtttatgcaggctcctctgtacctgtgttttagctgtcaggatctcatagagcccagttcttagagtcaactaaagagttgataggaatttactaggtccagggagaaaaggcagtggttggggttactggaaattttgctcattttctctaatgactgtatgaataaaagtgaacttacttgagcctttctcttctaaatctaaacaacctgatattgaaggtttgctttatagcatatctttggaaaggcaactcatttttatgattagtgatactggggtggatttaataggagagagaatccaggcagataagaataaaaaggaaaatgatcatctccttctatagcatttgcagattcaagggggagaggtagatgctgagatcaaaatgacagttgttacttatttttccaggtgctgttagtataaacattgtttcctcttcacccctgctaactacctctttaaagtatttctaccaaactgtgaacccaatctcagggaaaagaaattaaaaagtaatataaattctgcatatattaaaaacaatattgtaatatgttataatttcaggaccagaattttctggtctttacctacaagggttttcattatcaaaaaaaagaacatttgtttttctactttatgacttcaaagtaaataactgcccttttcagaatctccttccacaaaacaagccaactcttccccattccctccatcttcctttccaagtcataatggaaattgtaaggagttttaaaaatagggtttggcttttgcaaatagaagatattgattaaagcaaagtcaaatatagagtaaaataagtttaatttgttttcttaagacagggtcttgctctgttgcacaagctggagggcagtagtgcaatcacagctcactgaatccctgttctcccgggcctcaagcaatcttcccaccttagcctcccaagtagctgggactggctttttttttttttttttggccggggagggggtctcattggttgctcagcctggtctcaaactcctgggcttaagcagtcctcccaccttgacttccacagtgccgagattacaggcatgagccaccacacctggccaagtttaatttgttcatggctgagaacagttagctcggaatacttacattgttttttgaataaggaattccttattctgagtgagtcacgaatgagagctgatagatgctttcttgaaaagggcaatacagtcatcccttggtatccatgggggattggttccaggaacccaacttgatatcagaatccatgggtgctcaagtcccattatagagaatgggttatatggtatttgcatataacctacatacatcctcctgtgtactttaaatcatctgaagatgattacttatacctaataaaatacctacacatcacttcatttgcatggattcaacatagtgcttggtgttcagtaaattcaagttttgcttttttggaactttgtggaatttttctttttctgaatatttttgattggcagttggttgaagccatggatgcagaacccatggatatggagggctgactgtacttacttacatatctatctatctttgagtaacaaactctttgggggaaaagagggaagtgtattgagcaagagaaggcaaaaaacattacataatattttgattctgttacgtgtgtctatagattgtttcattctaatcaagacctaagaaggtatgattctgtgactgatttagaattctggggtggaaatatcctggaaccatgttttttaataaattctgtctcttggaaagagttaacaacagcctgggaaagagttgttattccaaaagtcagcctgttacttggtgaagctgaagtttaagagttctggggaaaaataaaatctagtaattccagcctagttaaaaaaaaaa

SEQ ID NO: 596 - DNA, 14450 bp, Artificial Sequence
  GRIN2A
atcatgggaccgggtgagcgctgagaatcgcggccgcagccatcagccctggagatgaccaggagcggccactgctgagaactatgtggagagaggctgcgagccctgctgcagagcctccggctgggatagccgccccccgtgggggcgatgcggacagcgcgggacagccaggggagcgcgctggggccgcagcatgcgggaacccgctaaacccggtggctgctgaggcggccgagatgctcgtgcgcgcagcgcgccccactgcatcctcgaccttctcgggctacagggaccgtcagtggcgactatgggcagagtgggctattggaccctgctggtgctgccggcccttctggtctggcgcggtccggcgccgagcgcggcggcggagaagggtccccccgcgctaaatattgcggtgatgctgggtcacagccacgacgtgacagagcgcgaacttcgaacactgtggggccccgagcaggcggcggggctgcccctggacgtgaacgtggtagctctgctgatgaaccgcaccgaccccaagagcctcatcacgcacgtgtgcgacctcatgtccggggcacgcatccacggcctcgtgtttggggacgacacggaccaggaggccgtagcccagatgctggattttatctcctcccacaccttcgtccccatcttgggcattcatgggggcgcatctatgatcatggctgacaaggatccgacgtctaccttcttccagtttggagcgtccatccagcagcaagccacggtcatgctgaagatcatgcaggattatgactggcatgtcttctccctggtgaccactatcttccctggctacagggaattcatcagcttcgtcaagaccacagtggacaacagctttgtgggctgggacatgcagaatgtgatcacactggacacttcctttgaggatgcaaagacacaagtccagctgaagaagatccactcttctgtcatcttgctctactgttccaaagacgaggctgttctcattctgagtgaggcccgctcccttggcctcaccgggtatgatttcttctggattgtccccagcttggtctctgggaacacggagctcatcccaaaagagtttccatcgggactcatttctgtctcctacgatgactgggactacagcctggaggcgagagtgagggacggcattggcatcctaaccaccgctgcatcttctatgctggagaagttctcctacatccccgaggccaaggccagctgctacgggcagatggagaggccagaggtcccgatgcacaccttgcacccatttatggtcaatgttacatgggatggcaaagacttatccttcactgaggaaggctaccaggtgcaccccaggctggtggtgattgtgctgaacaaagaccgggaatgggaaaaggtgggcaagtgggagaaccatacgctgagcctgaggcacgccgtgtggcccaggtacaagtccttctccgactgtgagccggatgacaaccatctcagcatcgtcaccctggaggaggccccattcgtcatcgtggaagacatagaccccctgaccgagacgtgtgtgaggaacaccgtgccatgtcggaagttcgtcaaaatcaacaattcaaccaatgaggggatgaatgtgaagaaatgctgcaaggggttctgcattgatattctgaagaagctttccagaactgtgaagtttacttacgacctctatctggtgaccaatgggaagcatggcaagaaagttaacaatgtgtggaatggaatgatcggtgaagtggtctatcaacgggcagtcatggcagttggctcgctcaccatcaatgaggaacgttctgaagtggtggacttctctgtgccctttgtggaaacgggaatcagtgtcatggtttcaagaagtaatggcaccgtctcaccttctgcttttctagaaccattcagcgcctctgtctgggtgatgatgtttgtgatgctgctcattgtttctgccatagctgtttttgtctttgaatacttcagccctgttggatacaacagaaacttagccaaagggaaagcaccccatgggccttcttttacaattggaaaagctatatggcttctttggggcctggtgttcaataactccgtgcctgtccagaatcctaaagggaccaccagcaagatcatggtatctgtatgggccttcttcgctgtcatattcctggctagctacacagccaatctggctgccttcatgatccaagaggaatttgtggaccaagtgaccggcctcagtgacaaaaagtttcagagacctcatgactattccccaccttttcgatttgggacagtgcctaatggaagcacggagagaaacattcggaataactatccctacatgcatcagtacatgaccaaatttaatcagaaaggagtagaggacgccttggtcagcctgaaaacggggaagctggacgctttcatctacgatgccgcagtcttgaattacaaggctgggagggatgaaggctgcaagctggtgaccatcgggagtgggtacatctttgccaccaccggttatggaattgcccttcagaaaggctctccttggaagaggcagatcgacctggccttgcttcagtttgtgggtgatggtgagatggaggagctggagaccctgtggctcactgggatctgccacaacgagaagaacgaggtgatgagcagccagctggacattgacaacatggcgggcgtattctacatgctggctgccgccatggcccttagcctcatcaccttcatctgggagcacctcttctactggaagctgcgcttctgtttcacgggcgtgtgctccgaccggcctgggttgctcttctccatcagcaggggcatctacagctgcattcatggagtgcacattgaagaaaagaagaagtctccagacttcaatctgacgggatcccagagcaacatgttaaaactcctccggtcagccaaaaacatttccagcatgtccaacatgaactcctcaagaatggactcacccaaaagagctgctgacttcatccaaagaggttccctcatcatggacatggtttcagataaggggaatttgatgtactcagacaacaggtcctttcaggggaaagagagcatttttggagacaacatgaacgaactccaaacatttgtggccaaccggcagaaggataacctcaataactatgtattccagggacaacatcctcttactctcaatgagtccaaccctaacacggtggaggtggccgtgagcacagaatccaaagcgaactctagaccccggcagctgtggaagaaatccgtggattccatacgccaggattcactatcccagaatccagtctcccagagggatgaggcaacagcagagaataggacccactccctaaagagccctaggtatcttccagaagagatggcccactctgacatttcagaaacgtcaaatcgggccacgtgccacagggaacctgacaacagtaagaaccacaaaaccaaggacaactttaaaaggtcagtggcctccaaataccccaaggactgtagtgaggtcgagcgcacctacctgaaaaccaaatcaagctcccctagagacaagatctacactatagatggtgagaaggagcctggtttccacttagatccaccccagtttgttgaaaatgtgaccctgcccgagaacgtggacttcccggacccctaccaggatcccagtgaaaacttccgcaagggggactccacgctgccaatgaaccggaaccccttgcataatgaagaggggctttccaacaacgaccagtataaactctactccaagcacttcaccttgaaagacaagggttccccgcacagtgagaccagcgagcgataccggcagaactccacgcactgcagaagctgcctttccaacatgcccacctattcaggccacttcaccatgaggtcccccttcaagtgcgatgcctgcctgcggatggggaacctctatgacatcgatgaagaccagatgcttcaggagacaggtaacccagccaccggggagcaggtctaccagcaggactgggcacagaacaatgcccttcaattacaaaagaacaagctaaggattagccgtcagcattcctacgataacattgtcgacaaacctagggagctagaccttagcaggccctcccggagcataagcctcaaggacagggaacggcttctggagggaaatttttacggcagcctgtttagtgtcccctcaagcaaactctcggggaaaaaaagctcccttttcccccaaggtctggaggacagcaagaggagcaagtctctcttgccagaccacacctccgataaccctttcctccactcccacagggatgaccaacgcttggttattgggagatgcccctcggacccttacaaacactcgttgccatcccaggcggtgaatgacagctatcttcggtcgtccttgaggtcaacggcatcgtactgttccagggacagtcggggccacaatgatgtgtatatttcggagcatgttatgccttatgctgcaaataagaataatatgtactctacccccagggttttaaattcctgcagcaatagacgcgtgtacaagaaaatgcctagtatcgaatctgatgtttaaaaatcttccattaatgttttatctatagggaaatatacgtaatggccaatgttctggagggtaaatgttggatgtccaatagtgccctgctaagaggaagaagatgtagggaggtattttgttgttgttgttgttggctcttttgcacacggcttcatgccataatcttccactcaaggaatcttgtgaggtgtgtgctgagcatggcagacaccagataggtgagtccttaaccaaaaataactaactacataagggcaagtctccgggacatgcctactgggtatgttggcaataatgatgcattggatgccaatggtgatgttatgatttcctatattccaaattccattaaggtcagcccaccatgtaattttctcatcagaaatgcctaatggtttctctaatacagaataagcaatatggtgtgcatgtaaacctgacacagacaaaataaaaacagttaagaatgcatctgcactgtagtgcgattgacatgtgcaagagattaggaagtttggctcgtaacagtttcagctttcttgttatgccttccatcacagcccaggctcaccccaagaactccaggctcccctaaagaatagcaaatcagtgtgttcgtgatgactgtgctaccttcattatagttcatttccaagacacatctggagccaaaggcccgagggaccctcaggtggggagagctacaggaatctctttggatgttgatgtgtgtttctctcaccctcggcttcgatggtcttgttcagagctgcataaactaacacatttatgtctccgagatctaagtgtggatcttctgtctgtgacacagtggccattgtagtttatcccgaagacgcctatgtacgtaagtttgcatttcctcccttctggtgatgactcagggttgtatagtatctgttaccccttccctcccagagtaaccataactcgttccgtttccaaacagccatggtggtgtccaattagctgtgtatcgctcttcccagagttgttaatgtggtgacatgcaccaacagccgtatgtgtactgtgatctgtaagaagtacaatgccatctgtctgccgaaggctagcatggttttaggtttatcttccttcacatccagaaattctgttggacactcacttccaccccaaactcctcaaatcaaaagccttcaaaacacgaggcactcttggatctaccctgagtatcctccaaactgtggatacagtttagtgagacaagcaatttctcccttctgagttattctctctgttggtggcaaaccacttcatagcaccaacagagatgtaggaaaaattcctcaaagtatttgtcatttctgagtcgcctgcattatcccattcttattctcctcaaacctgtgcatatatgacatgaaatgatatccattttttttttaagttagagacagagaggggaatacttatgcatggggagcctgttagcacagtgcctgccacaaaaacaagtgcccccgacaagatagttgctatgttatgacactttctcagatcaggattttctagtttaaaaattaaatatcataaaaccagcaaataatattaactaaaccttttatatagttctactctgttaattagtgtatttcatgtacatgaatatttttgaagtatttgggataactagccatcagtgtttgcagaagacctcagtctgttttgggccattacggaaacactaagctaatgtagactcgcctggccatttcctggtttcctcctgcattctgctttacattcttgaagaaagggataaagtggcaggttgaaaaattatcccatttcttctcctcatggtgtgcgttctgttttgtaagtattattttcttgcatgtgggcaagtgtcagggatgattcccttaaagctcaaggatgcatggaatagctccatctttgggaaagtacacctgacctacagtgttcctataatgaaaagtggttgcaataaatttcagggtcaatcatagggagacagagggaggcagtgggtgagaggagcttcctttcatttttgaaaggcagaaggggctgactaggtgctggggatgcatgtgcttgaaaatgacattttatttcccggatgctgtacctctgctgccccaagacccagccatggagaagcctggatcgaagggcccagaatagtcaccccaacatctgatcctaaatctgaatctccatgactgtgtagccttttagccctttctaccttctgcccttccagtgcattccagaccttaatccaccccagcaaggatcgcctccatttcctcatgagtctgggatgttttgacatgaatgaattaaaaagtcttcccagaatacagaagagtgatttgtcgtcaagccaaagaggctttctgtcttcctctggtgtcctctaaacccagggggctgccaaatgccacagagacctccagggagagtgagagttatacttggactgacttcatcggtcagaaagccttcccctaacagcagcattatttctgctattaaccccatacatctctggataaagaaactgaaaacgtggcctttggaagaatcaacagtaatgttgtgaaaaaaatatatattcttttcactgaccgaagtgttttttcaaataaataatcagaaatgttatgctacacaaagtttatggtatcccttctctactaattcaatgactcttcaatgtgatgatcccaagcaaaaaaaaaaaaaaaaaaaaaaaatcaactactgatcagatggtcaatttctaaggaaaagatgtagagttattcaaaggtcatctaagtcagttcagtctttgcaaaaagaatatcaggaatgtaacgtccagtggtaaatggaacccacagtatgagaagtaacaagaattaaataggaagcctggaagcctgagactatagatctatcacagaagattcccgtaacatatcccagctctgagttcttagatttgttgatgtcaaggagcccaaatttctgaacacaaatgcctgagtttcagctggcttaagtcagagctggcatccataatgatattttgttaattctaattggttttccccacttgagaaggacccaactagtcctcagataggtacacttgaatgcaaacggttgggtctctgtccatgggtaatagcacgcacatgcaaccaatttaaaatactctgggtaagagagtcttctagagcataaactgtacttgagaaacctttgtgcttctggaaaatgggtttcatcatccttacatctgcaggttcttaggccacttatggtttcaatgctctgagctggcaagtccctataggtctatctttctgccagagagacttgcaggattataatctcacaatctcaccactcattactgttatgtcctctgcaaatctctctgcgttattttagccagcaccatgactgggcatccacggattactcttgattttctcttccctgattcacaggatgccagagagtctgagtatttagtttttctggtgaaagcattaaaattcacacattgcagcaaaatctgtcaaatcatttcacgcttattttctggggagaaaaatagaaaattacaccttgtttacaaatgaaatagtttcacttaaatgggactctagccaaggcagttaattagtcaaaagatccacagctgtcatatagtcacacattgtttattctatttgctatgtcgaccactgatgtgtatttaatattctgcatccttcacaggaaatgacaaatgccctgaattatttgcaaatagaattgctaatgaaaaagaaaaaaaatgttgatgttaattaaatggtgattaaaaatttatctcctttaaatctaaaaagtgcagctttaataatcagttgtcatataaataagtaccttgtactgaaatcccttgcggtttaagacctaaataaacactaatttgagaactctaaataccttacagaggagctggatatattcgttaacattatgcacattcctgtactgtttctttgtgcatagctgttgtgcatgaatccttgaaaaggggacatgcgttgtttctgaaatggagcctgtttgtattaaccatggctatagtagacatgattggactcaaagaaaaagaagtttgagtaggtggaagctaaatgtgttgcttgatatttaatgagtgaagggttctatgtaaaggcaattttccttccaaaagtactgtttattttcactggagacaaaattagacctttccagataccccatctctttttggtgaacagggttgaaagtgctgtggggtctatacttgaaaagttctcccaatatgcagttactgtttcccattcaatccctatacattgtactgtgttcatatctaattgtatcagatgaggtcagcttgccacttgatatagatcagagatgatcaaatgcacttatcctgtgaatacaactgcttgtgtacacatgtatataatatacatgcttgatttctacaattcacacgtaagtgtattatccaaataaaattgtacatattgtaaagtttatgttaaaaattaaatggtgatgatggtattaacacatggaaaacccattctggttatttttatgggaggatatttctgtagagagggcactatatttttttaatctcagttgtagggaggatgacagagcctaagtagaatatgggtgttggcgttcttggccccttctttaaaaaacaaaactctgggatgaggggtatagaatatattctgctcgcatttgcttctgaagacaatgccgatatggacttgtgtgtgatttccttaaacacatcaaagggcatagatttcctatttaaattccttatcctctttcctcacctgcactctttctgtgcccagcagtactttcagtatagtattagctagaagtgcctgcccagaagggtcttagaaaaatagagttcgtagaaccacaccaaaagttaggagaaggggaggagagatgagaaaaatgaagtttacaaatgggcagttgcctgtttaagatcatcaagttagagagtatcagagcgaggattagatccaagacatggttcaatttctggctcgattctctgaccgggctgacttatttctaggtttctttcaaggggaaactcctgagtagctctggaataagagccagagatccccataaggctgccctggtttttgttttgttttgttttttgtttttgccacttgccccagaaagacctacccatgcttctttgaatttggttttcctttaaactccctcacaatccctgtcttaaagttcctagaagagaaaacttttctcagagaccgtctccttaggaaaaatcaacagggatattgtttaaaacctcaaactgaagataaaaggctggcagtgaccattgaaataattgaggtctatgtatcatgcattgaggaagaaccaagcacattgaccagctaataggacttcactgaatgtccactttattttgaaagccagtttgggattgtgggggaggggatgcaaaataaatagaaaatatagtctcttcccataagtagcttatggtttagaagttcagttctctaatacaaaggataaccaaggacccatgcaatgcaaacagagactaaacagcaaaaattagaaatgacaactaaagttgtagccaggaaaaaaaaaataatctgattctatgagcataccttttttaaaaaaaaaaaaaaagtccttccctaaacctttaagtaactccggagaatagagttagtggtcccggaaatgcagttgatttattttaatcttcaaataatggacttaggagacccaggagctgctaaccaggtgaacacactcacactcctacatttttgcacaggaaggcttttgtctggttccaaccagttctccagtccttgccaaatcatgcctcctcccagccttgcattatgacatgtgcctcaagaaaaggttgaaaaaattccccaaaggattagaaaatagaccatgatgtaaaaagacgaagcatttccctaaagcttttttgtttggttttgtttttgacatttgaagaacccttctgatacaccagggtatgaatgtatcagggaagcatagagggaaaattctttatcaagttccaagtgcctactgctgtggctgacagaaagcatcaggttccctagagagaaaacggggcaaagagatggcaaaaggaatagaggtgtatttcaggaaggatggcgaggtggagagggagcttttgtcactctgtctatcccattctgtgcattcttggaatgttacattttctgcttatcgcaagtacttgccatggatctgcacctgaatttgaaaatatcaaaatatatctaaattgagtgtaggcgatattctaggcatatcctagaatgtgatcctcaaaacaaccttaagatataaatatgattgctcccattttacagataaggaaactgaggctcaggtttttctcaacctcgtcagcaactagaattagctagtaaatccctaacgttagacatattttcaaagtgcctggtctcctccagggaggtcagaatagaagtcagaaagagaggtgtgctcttttgaggttcctgggcatatacccttgagtatcagcctctgtgacagggaagtctgttagggtcttacccctcattgcctgatctgtgtgtatggagaacttctggggatctcacctctgttcatagttccttctgagacttgaacactgtttgtgtctccctttcatatgcttgcacttagcatttaaaaaaatttctggggagttattttctctacttagcatgtgcctaatcttaaatatctctttcctaatgtctcatctttttatcagtcaacatcagggctaattccattaaacatatatacatagtacatgctctcatgtgtgtgggtatgcacacacacacacacagccatgtgaccctccattaaagtcctcctaaatattgtgacccatgttcaaagaggtgatattatttgcaagttgactattcctcctatttcatgtctatgtttggttatctttgccaggcagatggaatgagtttcagaggtgggacagggaataggaaatagagtttctgcatgaatgatggagagctttggtagtcagaatgattgaggaccagctattaaaatgttgttgttgttttccttcttggtctgttcctttttttttttcttttccaaattgtcttagagataattcccggctcacttagcattaggataatgacggttattctgtcccactgaagagtgttgaactggaacgcttccaccgggctttataggtacccagaatggcctaatgtttaacatatcctgcaggcatgcccctgagcacacactgcctttcctgcattcccccctctccatggtctaagccacatttctttcctggcatttatatttactgagaggtgaggggtgcattaggcccatttgatggatgaggacactagcggggatttgaaggaatgtctttctgggagtctccatgaattctctggagagttagctaacttaatgcaagttaagtgctagtctatgagaaaaatttctcagctgttttcatctttcaagctggcagtaaaaagccttttaagacagaaagattattatttgttatttggagatcctgttgttgggtctacaagtgcgtgaccatgttctccttggaatgttgagctatgcagaaatggagcactccaaagaacgatttgaccaatagcatttcttctctgggggttgtatttcaaagcatgcaactctccagggaaccagaactaaattgcttaaaatgaagtcattcctcagattaacttcctcagataaagtgtcagcggtctgcagaaacgaagaagacaaaactgagattatcactcataattctcttacttactatgtcagtgaaacaatgagtttgcatttttgcaatcctagaacattcttcattagccctgggtcatgacctcttccagttaattctctttcacacctttaggaaagatttaagatgaaccttcaataggatattaacataactcatagccaataccacagctgcctttcaaattaatgaggttaattgttctccagcaaacatgagtttgtctttggcattttaaatgcttcccattgatctgacattttgctgtttcaagttttaaagggctcaaatcaaagactattgataactgagcaaagagcgaagatccagaaatacgaaaacattgtctttttttttccatgaaaaacaatcatagccttttgaattcaatcgaagtttctacattagccatctaagacttatttaattatttctgttctcagtcaagctaattcaagtgaatgaacagtattgacttttaaaatcttttttaaatttttttaaatctttagtttattaagtttgtagaaaagctctggggccatgaccacttacgtaaatgtttcagtttaaaaacaaaagattcaggcctctaatttgagccaaatccaggtgatcttgtttgaaatttttgatgaatttgaaaagatgaaagtggaacttttaacattcatgttccccaaatttttcactgggaagggatgctaattgcctacttaagatataagttcaagaataacattttcatagaaaattcagaaaactgcttgacacagcagtgacatagttagatgtggctcagatgccttccaaacctgagggtccccaaagatttctttaccagttgtttttaactatgaatcttaatcttgttcattcccctgccaaaacaaatttaaaagcataaacctgctgaattaattggcagaattcaccatagtttatatcaccccagaatgtttatgtgtatatgtttatgtatagtatatatatttcaagctgaatgttcagaaagaataaggtgagtttcttggtagcttgaataagaattagatcataaaaattataaataatggccttctcaaagaggataaatgattcatttttcactcacgtattaataatatgacttgttgcataatacacaagctggtcattgcctgcaagaaagttattgaattaagcagctatccaggtttatgtctgagtccatttttaacccaacaaggctaggattgaactccatatgcagagggtttctattcacagctacattcaaacagaatccaaaacccacatcagaactgacttgatgtcttgtatggtggagctgaaagcaagctgtctgctctaagcaatggtcttcatttgggaattaatgttcactgatcaactgcagcagtttatatctgtcatgttttaatccactgcatgaggaagtgctaataagtgtattaaatatttccaagcatagctacaaaattatatgtttgcttaacacctttctatgatagaggaagtatatactatggttgtcttcttgtagtatgtcttttaattttgttcaatgtgttatcaactgttttaaggaatggggattgaaattcgtgtgcaaactgatatgtatataactcctgaggcaacagaagtgcccggtcatatggtgtaaaaatgtaaatacaggaaaatttcatttttctaataaagataatttctgccaattgatatgaaaatgagaaa

SEQ ID NO: 597 - DNA, 3169 bp, Artificial Sequence
  GJA1
cttctagcccctcctcccagttgagtcagtggcttgaaacttttaaaagctctgtgctccaagttacaaaaaagcttttacgaggtatcagcacttttctttcattagggggaaggcgtgaggaaagtaccaaacagcagcggagttttaaactttaaatagacaggtctgagtgcctgaacttgccttttcattttacttcatcctccaaggagttcaatcacttggcgtgacttcactacttttaagcaaaagagtggtgcccaggcaacatgggtgactggagcgccttaggcaaactccttgacaaggttcaagcctactcaactgctggagggaaggtgtggctgtcagtacttttcattttccgaatcctgctgctggggacagcggttgagtcagcctggggagatgagcagtctgcctttcgttgtaacactcagcaacctggttgtgaaaatgtctgctatgacaagtctttcccaatctctcatgtgcgcttctgggtcctgcagatcatatttgtgtctgtacccacactcttgtacctggctcatgtgttctatgtgatgcgaaaggaagagaaactgaacaagaaagaggaagaactcaaggttgcccaaactgatggtgtcaatgtggacatgcacttgaagcagattgagataaagaagttcaagtacggtattgaagagcatggtaaggtgaaaatgcgaggggggttgctgcgaacctacatcatcagtatcctcttcaagtctatctttgaggtggccttcttgctgatccagtggtacatctatggattcagcttgagtgctgtttacacttgcaaaagagatccctgcccacatcaggtggactgtttcctctctcgccccacggagaaaaccatcttcatcatcttcatgctggtggtgtccttggtgtccctggccttgaatatcattgaactcttctatgttttcttcaagggcgttaaggatcgggttaagggaaagagcgacccttaccatgcgaccagtggtgcgctgagccctgccaaagactgtgggtctcaaaaatatgcttatttcaatggctgctcctcaccaaccgctcccctctcgcctatgtctcctcctgggtacaagctggttactggcgacagaaacaattcttcttgccgcaattacaacaagcaagcaagtgagcaaaactgggctaattacagtgcagaacaaaatcgaatggggcaggcgggaagcaccatctctaactcccatgcacagccttttgatttccccgatgataaccagaattctaaaaaactagctgctggacatgaattacagccactagccattgtggaccagcgaccttcaagcagagccagcagtcgtgccagcagcagacctcggcctgatgacctggagatctagatacaggcttgaaagcatcaagattccactcaattgtggagaagaaaaaaggtgctgtagaaagtgcaccaggtgttaattttgatccggtggaggtggtactcaacagccttattcatgaggcttagaaaacacaaagacattagaatacctaggttcactgggggtgtatggggtagatgggtggagagggaggggataagagaggtgcatgttggtatttaaagtagtggattcaaagaacttagattataaataagagttccattaggtgatacatagataagggctttttctccccgcaaacacccctaagaatggttctgtgtatgtgaatgagcgggtggtaattgtggctaaatatttttgttttaccaagaaactgaaataattctggccaggaataaatacttcctgaacatcttaggtcttttcaacaagaaaaagacagaggattgtccttaagtccctgctaaaacattccattgttaaaatttgcactttgaaggtaagctttctaggcctgaccctccaggtgtcaatggacttgtgctactatatttttttattcttggtatcagtttaaaattcagacaaggcccacagaataagattttccatgcatttgcaaatacgtatattctttttccatccacttgcacaatatcattaccatcactttttcatcattcctcagctactactcacattcatttaatggtttctgtaaacatttttaagacagttgggatgtcacttaacattttttttttgagctaaagtcagggaatcaagccatgcttaatatttaacaatcacttatatgtgtgtcgaagagtttgttttgtttgtcatgtattggtacaagcagatacagtataaactcacaaacacagatttgaaaataatgcacatatggtgttcaaatttgaacctttctcatggatttttgtggtgtgggccaatatggtgtttacattatataattcctgctgtggcaagtaaagcacactttttttttctcctaaaatgtttttccctgtgtatcctattatggatactggttttgttaattatgattctttattttctctcctttttttaggatatagcagtaatgctattactgaaatgaatttcctttttctgaaatgtaatcattgatgcttgaatgatagaattttagtactgtaaacaggctttagtcattaatgtgagagacttagaaaaaatgcttagagtggactattaaatgtgcctaaatgaattttgcagtaactggtattcttgggttttcctacttaatacacagtaattcagaacttgtattctattatgagtttagcagtcttttggagtgaccagcaactttgatgtttgcactaagattttatttggaatgcaagagaggttgaaagaggattcagtagtacacatacaactaatttatttgaactatatgttgaagacatctaccagtttctccaaatgccttttttaaaactcatcacagaagattggtgaaaatgctgagtatgacacttttcttcttgcatgcatgtcagctacataaacagttttgtacaatgaaaattactaatttgtttgacattccatgttaaactacggtcatgttcagcttcattgcatgtaatgtagacctagtccatcagatcatgtgttctggagagtgttctttattcaataaagttttaatttagtataaacatagcttctatattccgtgt

SEQ ID NO: 598 - DNA, 860 bp, Artificial Sequence
  GH1
aagagaccagctcaaggatcccaaggcccaactccccgaaccactcagggtcctgtggacagctcacctagctgcaatggctacaggctcccggacgtccctgctcctggcttttggcctgctctgcctgccctggcttcaagagggcagtgccttcccaaccattcccttatccaggctttttgacaacgctatgctccgcgcccatcgtctgcaccagctggcctttgacacctaccaggagtttgaagaagcctatatcccaaaggaacagaagtattcattcctgcagaacccccagacctccctctgtttctcagagtctattccgacaccctccaacagggaggaaacacaacagaaatccaacctagagctgctccgcatctccctgctgctcatccagtcgtggctggagcccgtgcagttcctcaggagtgtcttcgccaacagcctggtgtacggcgcctctgacagcaacgtctatgacctcctaaaggacctagaggaaggcatccaaacgctgatggggaggctggaagatggcagcccccggactgggcagatcttcaagcagacctacagcaagttcgacacaaactcacacaacgatgacgcactactcaagaactacgggctgctctactgcttcaggaaggacatggacaaggtcgagacattcctgcgcatcgtgcagtgccgctctgtggagggcagctgtggcttctagctgcccgggtggcatccctgtgacccctccccagtgcctctcctggccctggaagttgccactccagtgcccaccagccttgtcctaataaaattaagttgcatcattttgtctgaaaaaaaaaaaaaaa

SEQ ID NO: 599 - DNA, 6069 bp, Artificial Sequence
  MYH7
cagcccctgagaccaggtctggctccacagctctgtcctgctctgtgtctttccctgctgctctcaggtcccctgcaggccttggcccctttcctcatctgtagacacacttgagtagcccaggcacagccatgggagattcggagatggcagtctttggggctgccgccccctacctgcgcaagtcagagaaggagcggctagaagcgcagaccaggccttttgacctcaagaaggatgtcttcgtgcctgatgacaaacaggagtttgtcaaggccaagatcgtgtctcgagagggtggcaaagtcactgccgagaccgagtatggcaagacagtgaccgtgaaggaggaccaggtgatgcagcagaacccacccaagttcgacaaaatcgaggacatggccatgctgaccttcctgcatgagcccgcggtgctctacaacctcaaggatcgctacggctcctggatgatctacacctactcgggcctcttctgtgtcaccgtcaacccttacaagtggctgccggtgtacactcctgaggtggtggctgcctaccggggcaagaagaggagcgaggccccgccccacatcttctccatctccgacaacgcctatcagtacatgctgacagacagagaaaaccagtccatcctgatcaccggagaatccggagcagggaagacagtcaacaccaagagggtcatccagtactttgctgttattgcagccattggggaccgcagcaagaaggaccagagcccgggcaagggcaccctggaggaccagatcatccaggccaaccctgctctggaggcctttggcaatgccaagaccgtccggaacgacaactcctcccgcttcgggaaattcattcgaattcattttggggcaacaggaaagttggcatctgcagacatagagacctatcttctggaaaaatccagagttattttccagctgaaagcagagagagattatcacattttctaccaaatcctgtctaacaaaaagcctgagctgctggacatgctgctgatcaccaacaacccctacgattatgcattcatctcccaaggagagaccaccgtggcctccattgatgacgctgaggagctcatggccactgataacgcttttgatgtgctgggcttcacttcagaggagaaaaactccatgtataagctgacaggcgccatcatgcactttggaaacatgaagttcaagctgaagcagcgggaggagcaggcggagccagacggcactgaagaggctgacaagtctgcctacctcatggggctgaactcagccgacctgctcaaggggctgtgccaccctcgggtgaaagtgggcaatgagtacgtcaccaaggggcagaatgtccagcaggtgatatatgccactggggcactggccaaggcagtgtatgagaggatgttcaactggatggtgacgcgcatcaatgccaccctggagaccaagcagccacgccagtacttcataggagtcctggacatcgctggcttcgagatcttcgatttcaacagctttgagcagctctgcatcaacttcaccaacgagaagctgcagcagttcttcaaccaccacatgtttgtgctggagcaggaggagtacaagaaggagggcatcgagtggacattcattgactttggcatggacctgcaggcctgcattgacctcatcgagaagcccatgggcatcatgtccatcctggaagaggagtgcatgttccccaaggccaccgacatgaccttcaaggccaagctgtttgacaaccacctgggcaaatccgccaacttccagaagccacgcaatatcaaggggaagcctgaagcccacttctccctgatccactatgccggcatcgtggactacaacatcattggctggctgcagaagaacaaggatcctctcaatgagactgtcgtgggcttgtatcagaagtcttccctcaagctgctcagcaccctgtttgccaactatgctggggctgatgcgcctattgagaagggcaaaggcaaggccaagaaaggctcgtcctttcagactgtgtcagctctgcacagggaaaatctgaacaagctgatgaccaacttgcgctccacccatccccactttgtacgttgtatcatccctaatgagacaaagtctccaggggtgatggacaaccccctggtcatgcaccagctgcgctgcaatggtgtgctggagggcatccgcatctgcaggaaaggcttccccaaccgcatcctctacggggacttccggcagaggtatcgcatcctgaacccagcggccatccctgagggacagttcattgatagcaggaagggggcagagaagctgctcagctccctggacattgatcacaaccagtacaagtttggccacaccaaggtgttcttcaaggccgggctgctggggctgctggaggaaatgagggacgagaggctgagccgcatcatcacgcgtatccaggcccagtcccgaggtgtgctcgccagaatggagtacaaaaagctgctggaacgtagagactccctgctggtaatccagtggaacattcgggccttcatgggggtcaagaattggccctggatgaagctctacttcaagatcaagccgctgctgaagagtgcagaaagagagaaggagatggcctccatgaaggaggagttcacacgcctcaaagaggcgctagagaagtccgaggctcgccgcaaggagctggaggagaagatggtgtccctgctgcaggagaagaatgacctgcagctccaagtgcaggcggaacaagacaacctggcagatgctgaggagcgctgtgatcagctgatcaaaaacaagattcagctggaggccaaggtgaaggagatgaacgagaggctggaggatgaggaggagatgaatgctgagctcactgccaagaagcgcaagctggaagatgagtgctcagagctcaaaagggacatcgatgatctggagctgacactggccaaagtggagaaggagaaacacgcaacagagaacaaggtgaaaaacctgacagaggagatggctgggctggatgagatcattgccaagctgaccaaggagaagaaagctctgcaagaggcccaccaacaggctctggatgaccttcaggccgaggaggacaaggtcaacaccctgactaaggccaaagtcaagctggagcagcaagtggatgatctggaaggatccctggagcaagagaagaaggtgcgcatggacctggagcgagcgaagcggaagctggagggcgacctgaagctgacccaggagagcatcatggacctggagaatgacaagcagcagctggatgagcggctgaaaaaaaaagactttgagctgaatgctctcaacgcaaggattgaggatgaacaggccctcggcagccagctgcagaagaagctcaaggagcttcaggcacgcatcgaggagctggaggaggagctggaggccgagcgcaccgccagggctaaggtggagaagctgcgctcagacctgtctcgggagctggaggagatcagcgagcggctggaagaggccggcggggccacgtccgtgcagatcgagatgaacaagaagcgcgaggccgagttccagaagatgcggcgggacctggaggaggccacgctgcagcacgaggccactgccgcggccctgcgcaagaagcacgccgacagcgtggccgagctgggcgagcagatcgacaacctgcagcgggtgaagcagaagctggagaaggagaagagcgagttcaagctggagctggatgacgtcacctccaacatggagcagatcatcaaggccaaggctaacctggagaagatgtgccggaccttggaagaccagatgaatgagcaccggagcaaggcggaggagacccagcgttctgtcaacgacctcaccagccagcgggccaagttgcaaaccgagaatggtgagctgtcccggcagctggatgagaaggaggcactgatctcccagctgacccgaggcaagctcacctacacccagcagctggaggacctcaagaggcagctggaggaggaggttaaggcgaagaacgccctggcccacgcactgcagtcggcccggcatgactgcgacctgctgcgggagcagtacgaggaggagacggaggccaaggccgagctgcagcgcgtcctttccaaggccaactcggaggtggcccagtggaggaccaagtatgagacggacgccattcagcggactgaggagctcgaggaggccaagaagaagctggcccagcggctgcaggaagctgaggaggccgtggaggctgttaatgccaagtgctcctcgctggagaagaccaagcaccggctacagaatgagatcgaggacttgatggtggacgtagagcgctccaatgctgctgctgcagccctggacaagaagcagaggaacttcgacaagatcctggccgagtggaagcagaagtatgaggagtcgcagtcggagctggagtcctcgcagaaggaggctcgctccctcagcacagagctcttcaaactcaagaacgcctatgaggagtccctggaacatctggagaccttcaagcgggagaacaaaaacctgcaggaggagatctccgacttgactgagcagttgggttccagcggaaagactatccatgagctggagaaggtccgaaagcagctggaggccgagaagatggagctgcagtcagccctggaggaggccgaggcctccctggagcacgaggagggcaagatcctccgggcccagctggagttcaaccagatcaaggcagagatcgagcggaagctggcagagaaggacgaggagatggaacaggccaagcgcaaccacctgcgggtggtggactcgctgcagacctccctggacgcagagacacgcagccgcaacgaggccctgagggtgaagaagaagatggaaggagacctcaatgagatggagatccagctcagccacgccaaccgcatggccgccgaggcccagaagcaagtcaagagcctccagagcttgttgaaggacacccagattcagctggacgatgcagtccgtgccaacgacgacctgaaggagaacatcgccatcgtggagcggcgcaacaacctgctgcaggctgagctggaggagttgcgtgccgtggtggagcagacagagcggtcccggaagctggcggagcaggagctgattgagactagtgagcgggtgcagctgctgcattcccagaacaccagcctcatcaaccagaagaagaagatggatgctgacctgtcccagctccagactgaagtggaggaggcagtgcaggagtgcaggaatgctgaggagaaggccaagaaggccatcacggatgccgccatgatggcagaggagctgaagaaggagcaggacaccagcgcccacctggagcgcatgaagaagaacatggaacagaccattaaggacctgcagcaccggctggacgaagccgagcagatcgccctcaagggcggcaagaagcagctgcagaagctggaagcgcgggtgcgggagctggagaatgagctggaggccgagcagaagcgcaacgcagagtcggtgaagggcatgaggaagagcgagcggcgcatcaaggagctcacctaccagacggaggaggacaggaaaaacctgctgcggctgcaggacctggtagacaagctgcagctaaaggtcaaggcctacaagcgccaggccgaggaggcggaggagcaagccaacaccaacctgtccaagttccgcaaggtgcagcacgagctggatgaggcagaggagcgggcggacatcgccgagtcccaggtcaacaagctgcgggccaagagccgtgacattggcacgaagggcttgaatgaggagtagctttgccacatcttgatctgctcagccctggaggtgccagcaaagccccatgctggagcctgtgtaacagctccttgggaggaagcagaataaagcaattttccttgaagccgagaaaaaaaaaaaaaaa

SEQ ID NO: 600 - DNA, 3070 bp, Artificial Sequence
  PLP1
aaagcaggcctgtccctttaagggggttggctgtcaatcagaaagcccttttcattgcaggagaagaggacaaagatactcagagagaaaaagtaaaagaccgaagaaggaggctggagagaccaggatccttccagctgaacaaagtcagccacaaagcagactagccagccggctacaattggagtcagagtcccaaagacatgggcttgttagagtgctgtgcaagatgtctggtaggggccccctttgcttccctggtggccactggattgtgtttctttggggtggcactgttctgtggctgtggacatgaagccctcactggcacagaaaagctaattgagacctatttctccaaaaactaccaagactatgagtatctcatcaatgtgatccatgccttccagtatgtcatctatggaactgcctctttcttcttcctttatggggccctcctgctggctgagggcttctacaccaccggcgcagtcaggcagatctttggcgactacaagaccaccatctgcggcaagggcctgagcgcaacggtaacagggggccagaaggggaggggttccagaggccaacatcaagctcattctttggagcgggtgtgtcattgtttgggaaaatggctaggacatcccgacaagtttgtgggcatcacctatgccctgaccgttgtgtggctcctggtgtttgcctgctctgctgtgcctgtgtacatttacttcaacacctggaccacctgccagtctattgccttccccagcaagacctctgccagtataggcagtctctgtgctgatgccagaatgtatggtgttctcccatggaatgctttccctggcaaggtttgtggctccaaccttctgtccatctgcaaaacagctgagttccaaatgaccttccacctgtttattgctgcatttgtgggggctgcagctacactggtttccctgctcaccttcatgattgctgccacttacaactttgccgtccttaaactcatgggccgaggcaccaagttctgatcccccgtagaaatccccctttctctaatagcgaggctctaaccacacagcctacaatgctgcgtctcccatcttaactctttgcctttgccaccaactggccctcttcttacttgatgagtgtaacaagaaaggagagtcttgcagtgattaaggtctctctttggactctcccctcttatgtacctcttttagtcattttgcttcatagctggttcctgctagaaatgggaaatgcctaagaagatgacttcccaactgcaagtcacaaaggaatggaggctctaattgaattttcaagcatctcctgaggatcagaaagtaatttcttctcaaagggtacttccactgatggaaacaaagtggaaggaaagatgctcaggtacagagaaggaatgtctttggtcctcttgccatctataggggccaaatatattctctttggtgtacaaaatggaattcattctggtctctctattaccactgaagatagaagaaaaaagaatgtcagaaaaacaataagagcgtttgcccaaatctgcctattgcagctgggagaagggggtcaaagcaaggatctttcacccacagaaagagagcactgaccccgatggcgatggactactgaagccctaactcagccaaccttacttacagcataagggagcgtagaatctgtgtagacgaagggggcatctggccttacacctcgttagggaagagaaacagggtgttgtcagcatcttctcactcccttctccttgataacagctaccatgacaaccctgtggtttccaaggagctgagaatagaaggaaactagcttacatgagaacagactggcctgaggagcagcagttgctggtggctaatggtgtaacctgagatggccctctggtagacacaggatagataactctttggatagcatgtctttttttctgttaattagttgtgtactctggcctctgtcatatcttcacaatggtgctcatttcatggggtattatccattcagtcatcgtaggtgatttgaaggtcttgatttgttttagaatgatgcacatttcatgtattccagtttgtttattacttatttggggttgcatcagaaatgtctggagaataattctttgattatgactgttttttaaactaggaaaattggacattaagcatcacaaatgatattaaaaattggctagttgaatctattgggattttctacaagtattctgcctttgcagaaacagatttggtgaatttgaatctcaatttgagtaatctgatcgttctttctagctaatggaaaatgattttacttagcaatgttatcttggtgtgttaagagttaggtttaacataaaggttattttctcctgatatagatcacataacagaatgcaccagtcatcagctattcagttggtaagcttccaggaaaaaggacaggcagaaagagtttgagacctgaatagctcccagatttcagtcttttcctgtttttgttaactttgggttaaaaaaaaaaaaagtctgattggttttaattgaaggaaagatttgtactacagttcttttgttgtaaagagttgtgttgttcttttcccccaaagtggtttcagcaatatttaaggagatgtaagagctttacaaaaagacacttgatacttgttttcaaaccagtatacaagataagcttccaggctgcatagaaggaggagagggaaaatgttttgtaagaaaccaatcaagataaaggacagtgaagtaatccgtaccttgtgttttgttttgatttaataacataacaaataaccaacccttccctgaaaacctcacatgcatacatacacatatatacacacacaaagagagttaatcaactgaaagtgtttccttcatttctgatatagaattgcaattttaacacacataaaggataaacttttagaaacttatcttacaaagtgtattttataaaattaaagaaaataaaattaagaatgttctcaatcaaaaaaaaaaaaaaa

SEQ ID NO: 601 - DNA, 1702 bp, Artificial Sequence
  AMY2A
aacagtttgccctcaagtatttattcatgctaatatttactttgtaaaatgtgcttcttacaggaatataaatagtttctggaaaggacactgacaacttcaaagcaaaatgaagttctttctgttgcttttcaccattgggttctgctgggctcagtattccccaaatacacaacaaggacggacatctattgttcatctgtttgaatggcgatgggttgatattgctcttgaatgtgagcgatatttagctccgaagggatttggaggggttcaggtctctccaccaaatgaaaatgttgcaatttacaaccctttcagaccttggtgggaaagataccaaccagttagctataaattatgcacaagatctggaaatgaagatgaatttagaaacatggtgactagatgtaacaatgttggggttcgtatttatgtggatgctgtaattaatcatatgtgtggtaacgctgtgagtgcaggaacaagcagtacctgtggaagttacttcaaccctggaagtagggactttccagcagtcccatattctggatgggatttcaatgatggtaaatgtaaaactggaagtggagatatcgagaactacaatgatgctactcaggtcagagattgtcgtctgactggtcttcttgatcttgcactggagaaggattacgtgcgttctaagattgccgaatatatgaaccatctcattgacattggtgttgcagggttcagacttgatgcttccaagcacatgtggcctggagacataaaggcaattttggacaaactgcataatctaaacagtaactggttccctgcaggaagtaaacctttcatttaccaggaggtaattgatctgggtggtgagccaattaaaagcagtgactactttggtaatggccgggtgacagaattcaagtatggtgcaaaactcggcacagttattcgcaagtggaatggagagaagatgtcttacttaaagaactggggagaaggttggggtttcgtaccttctgacagagcgcttgtctttgtggataaccatgacaatcaacgaggacatggggctggaggagcctctattcttaccttctgggatgctaggctgtacaaaatggcagttggatttatgcttgctcatccttacggatttacacgagtaatgtcaagctaccgttggccaagacagtttcaaaatggaaacgatgttaatgattgggttgggccaccaaataataatggagtaattaaagaagttactattaatccagacactacttgtggcaatgactgggtctgtgaacatcgatggcgccaaataaggaacatggttattttccgcaatgtagtggatggccagccttttacaaattggtatgataatgggagcaaccaagtggcttttgggagaggaaacagaggattcattgttttcaacaatgatgactggtcattttctttaactttgcaaactggtcttcctgctggcacatactgtgatgtcatttctggagataaaattaatggcaattgcacaggcattaaaatttacgtttctgatgatggcaaagctcatttttctattagtaactctgctgaagatccatttattgcaattcatgctgaatctaaattgtaaaatttaaaattaaatgcatgtcctcaaaacaataaaaaaaaaaaaaaaaaaaaaaaa

SEQ ID NO: 602 - DNA, 3801 bp, Artificial Sequence
  ERMN
cacaactgtctctactgccaaggtgctaatgccgaacccctgtgggatctctggtccaaggaaacatctgcacacaggccagggatggcgcttagcttcatctgtgctgcaaactctcatcagtaggcttgctggctctgtgaccttactagctgaactccttaatctctctgcacttcatttttctagtctataaaatggagataacaacagcacctacctcagaagactgttatgaagactctctctccagatcggattcaaccgcacatcatgacagatgttccggctacatttacccaggctgagtgtaatggggataaaccacctgaaaacggtcaacaaacaatcactaaaatcagtgaggaattgactgatgtggacagccccctgccacactacagggtagaacccagtctggaaggtgcactcaccaaaggaagtcaggaggaaagaagaaaattacaagggaacatgctgctcaactcatccatggaggacaaaatgctaaaagaaaacccagaagagaaactctttattgttcataaggctatcacagatctttctctccaagaaactagtgctgatgaaatgacattcagagaagggcatcagtgggagaagattcctctgagtggcagtaaccaggaaataagaagacagaaggagaggattactgagcagcctctcaaagaggaagaagatgaggacaggaagaacaaaggtcaccaggcagctgaaattgaatggctgggatttcgaaaacctagccaagctgacatgttacattctaaacatgatgaggagcagaaggtttgggatgaagaaattgatgatgatgatgatgataattgcaataatgatgaagatgaagttcgagtgatagaatttaagaaaaaacatgaagaggtttctcaatttaaagaggaaggtgatgcaagtgaggactccccactgagcagtgccagttcccaagctgtgacacctgatgagcagccaaccttagggaagaagagtgatatctccagaaatgcttattccagatacaatacaatatcctatcggaaaatcagaaagggaaataccaagcaaagaattgatgaattcgagtctatgatgcatttataaactaactggaactgagaaattctcatgcccactaaaggaaaagctaattctattgccccagggtgcatatttctatgccttatttgagttatcacttggagggaggtggaagttgactctctttttcactgtagaataatgtggaaataaccctagataaaaattcagtctgataacctcaaatcaaaaagctttaaataaattcttgggcatttatcttttaaaacttcactaatatagcattgtgtgataagcactaagcagtcagtcccctgggggaatctggcataattcggctataaatgtagcaatgcttggaaaggtagtcatcaaatgagactatttgaggggactatttgaaatgattctggtatttcttttggtatctttcttcctgtacattggagtgatggaaagtctggtattaaaacctctcttacttttaaacttgattttgcagactctggcaataagccttccaaaattctgtgccttttctattatcaccaaacaatatgttaagtggctttccttggcatctacagagaaaacattctatagccctccttcctaggtgttaccattcactgaatcttctctcagagggagatgagcaattgtcagtcaggataattctgtttgctaaatgttgcctttatgctttcaaactgaattaaacccattgtgaggttgacactgggaggggctagaagattggtgggcagcagactaaagagttatgttggatagttttatttctgtggctgaaaataaaatcttgtctagcacagttaaagtcattaaaaataaaaatgacagctttagcacaattttaagaaaatgcccctctctattaccacattttctcttattaacagtatctcagaataattttctttccttagaaacctgagagaatgctagtcataactgtactagttactatgaaaatggaaataattatcttagaatattttcaaagtagagcgtgagcatgtatttttagtgggagagctctgatagttgttgggaatatataatttactggacctcagcccaaatcaagatgcttaaaattgtacttgtggagcttcactcaaaccaatgtgtcaaataacgtattgaatatttatgaaaagagagactatatttatattcttagatagtttgttccacaatttttcatttcatgcttccatatatattaccctgaactttctatcaccacagataaagattttgttttgccctgcaaataaaaagacaattccttattgtctgaatgtaatacagtcttcattgtactattcaaccctttgtttctttctttttcattttgtgaaaaactccatgttagtcctcttagatgactgcttatttatgtgtaacataaatcccacatattctaatgacaacttctttaatccttccgggtcatatattatatttccatagtatcacatactattatttagttgtttacaagactccaatttgaattcaggattacagtgctcctttcattctttcaaacagataacataaaagttctgttaccctcattctatacaacctatggatttcatgtgttacaatatcagtttccagaataaagtgagggaaatcaggtctttattgataaagttagggagaagattgatgcaataggacaatttccaatttaatttagatcctctaatctttctacatggacaagctgttttcttttctaggttactgataacccctacaattttcgacttaacttcaaaacacagtattgtgttatctatcacataacaggaccatgtttttaacctaccatcaagagcctgtattttgagttattccaacagagatgatggattcctgtagaactagaggtgggtgacctatggttatgtggcacggcaaagcaagtacctcttaagggactctaatatatgctaacgctggtcctcttagctctgtgctctcaccagacaatgaatgaactatgaaagatttagtcaacagaaactattttagggtatgtttagttggtaaatgcttcatgttcatggatgacacaatgtttttgcaaaaaaaccctgaaactattctttggcattggtgtccatggccctataccgccatcttacacgaaagccacagagttgaaagccacagagttgaaagccacagagttaagtgacctcaggtaacataatggtgatggttggccatttgagtctttgtaacctaggaaagacaaaggtctgattcagattgcatgggggatttttaacatatttgaaactcagggggaacatgattaagaacacaaactggtagctacacatgaaggtttacttgagcttttgtgattcaaagttcaggggtggtaaggactctggtaccagggaagagggagaattaatttattgtgcaaatgctggtatttcttacatgattttttgttttcctctgttgctagataaatagaaactaataatagctctatttctctgccaatataaaatctacctttcatataatgctacattgaaggcacagaatttgctaccatctctctctccccctacctaccaaactatccacaatttaaataaagaactgctgtgtctgacttactctcaataaaagtttgtgtctttaaaaaaaaaaaaaaaa

SEQ ID NO: 603 - DNA, 1735 bp, Artificial Sequence
  FGG
tgacagtataggttgggggccaggatgaggaaaaaggaacgggaaagacctgcccacccttctggtaaggaggccccgtgatcagctccagccatttgcagtcctggctatcccaggagcttacataaagggacaattggagcctgagaggtgacagtgctgacactacaaggctcggagctccgggcactcagacatcatgagttggtccttgcacccccggaatttaattctctacttctatgctcttttatttctctcttcaacatgtgtagcatatgttgctaccagagacaactgctgcatcttagatgaaagattcggtagttattgtccaactacctgtggcattgcagatttcctgtctacttatcaaaccaaagtagacaaggatctacagtctttggaagacatcttacatcaagttgaaaacaaaacatcagaagtcaaacagctgataaaagcaatccaactcacttataatcctgatgaatcatcaaaaccaaatatgatagacgctgctactttgaagtccaggaaaatgttagaagaaattatgaaatatgaagcatcgattttaacacatgactcaagtattcgatatttgcaggaaatatataattcaaataatcaaaagattgttaacctgaaagagaaggtagcccagcttgaagcacagtgccaggaaccttgcaaagacacggtgcaaatccatgatatcactgggaaagattgtcaagacattgccaataagggagctaaacagagcgggctttactttattaaacctctgaaagctaaccagcaattcttagtctactgtgaaatcgatgggtctggaaatggatggactgtgtttcagaagagacttgatggcagtgtagatttcaagaaaaactggattcaatataaagaaggatttggacatctgtctcctactggcacaacagaattttggctgggaaatgagaagattcatttgataagcacacagtctgccatcccatatgcattaagagtggaactggaagactggaatggcagaaccagtactgcagactatgccatgttcaaggtgggacctgaagctgacaagtaccgcctaacatatgcctacttcgctggtggggatgctggagatgcctttgatggctttgattttggcgatgatcctagtgacaagtttttcacatcccataatggcatgcagttcagtacctgggacaatgacaatgataagtttgaaggcaactgtgctgaacaggatggatctggttggtggatgaacaagtgtcacgctggccatctcaatggagtttattaccaaggtggcacttactcaaaagcatctactcctaatggttatgataatggcattatttgggccacttggaaaacccggtggtattccatgaagaaaaccactatgaagataatcccattcaacagactcacaattggagaaggacagcaacaccacctggggggagccaaacaggctggagacgtttaaaagaccgtttcaaaagagatttacttttttaaaggactttatctgaacagagagatataatatttttcctattggacaatggacttgcaaagcttcacttcattttaagagcaaaagaccccatgttgaaaactccataacagttttatgctgatgataatttatctacatgcatttcaataaaccttttgtttcctaagactagaaaaaaaaaaaaaaaaa

SEQ ID NO: 604 - DNA, 1239 bp, Artificial Sequence
  APOA1
cacaatggacaatggcaactgcccacacactcccatggaggggaaggggatgagtgcagggaaccccgaccccacccgggagacctgcaagcctgcagacactcccctcccgcccccactgaacccttgacccctgccctgcagcccccgcagcttgctgtttgcccactctatttgcccagccccagggacagagctgatccttgaactcttaagttccacattgccaggaccagtgagcagcaacagggccggggctgggcttatcagcctcccagcccagaccctggctgcagacataaataggccctgcaagagctggctgcttagagactgcgagaaggaggtcccccacggcccttcaggatgaaagctgcggtgctgaccttggccgtgctcttcctgacggggagccaggctcggcatttctggcagcaagatgaacccccccagagcccctgggatcgagtgaaggacctggccactgtgtacgtggatgtgctcaaagacagcggcagagactatgtgtcccagtttgaaggctccgccttgggaaaacagctaaacctaaagctccttgacaactgggacagcgtgacctccaccttcagcaagctgcgcgaacagctcggccctgtgacccaggagttctgggataacctggaaaaggagacagagggcctgaggcaggagatgagcaaggatctggaggaggtgaaggccaaggtgcagccctacctggacgacttccagaagaagtggcaggaggagatggagctctaccgccagaaggtggagccgctgcgcgcagagctccaagagggcgcgcgccagaagctgcacgagctgcaagagaagctgagcccactgggcgaggagatgcgcgaccgcgcgcgcgcccatgtggacgcgctgcgcacgcatctggccccctacagcgacgagctgcgccagcgcttggccgcgcgccttgaggctctcaaggagaacggcggcgccagactggccgagtaccacgccaaggccaccgagcatctgagcacgctcagcgagaaggccaagcccgcgctcgaggacctccgccaaggcctgctgcccgtgctggagagcttcaaggtcagcttcctgagcgctctcgaggagtacactaagaagctcaacacccagtgaggcgcccgccgccgccccccttcccggtgctcagaataaacgtttccaaagtgggaaaaaaaaaaaaaa

SEQ ID NO: 605 - DNA, 3692 bp, Artificial Sequence
  FGA
aggatgggaactaggagtggcagcaatcctttctttcagctggagtgctcctcaggagccagccccacccttagaaaagatgttttccatgaggatcgtctgcctggtcctaagtgtggtgggcacagcatggactgcagatagtggtgaaggtgactttctagctgaaggaggaggcgtgcgtggcccaagggttgtggaaagacatcaatctgcctgcaaagattcagactggcccttctgctctgatgaagactggaactacaaatgcccttctggctgcaggatgaaagggttgattgatgaagtcaatcaagattttacaaacagaataaataagctcaaaaattcactatttgaatatcagaagaacaataaggattctcattcgttgaccactaatataatggaaattttgagaggcgatttttcctcagccaataaccgtgataatacctacaaccgagtgtcagaggatctgagaagcagaattgaagtcctgaagcgcaaagtcatagaaaaagtacagcatatccagcttctgcagaaaaatgttagagctcagttggttgatatgaaacgactggaggtggacattgatattaagatccgatcttgtcgagggtcatgcagtagggctttagctcgtgaagtagatctgaaggactatgaagatcagcagaagcaacttgaacaggtcattgccaaagacttacttccctctagagataggcaacacttaccactgataaaaatgaaaccagttccagacttggttcccggaaattttaagagccagcttcagaaggtacccccagagtggaaggcattaacagacatgccgcagatgagaatggagttagagagacctggtggaaatgagattactcgaggaggctccacctcttatggaaccggatcagagacggaaagccccaggaaccctagcagtgctggaagctggaactctgggagctctggacctggaagtactggaaaccgaaaccctgggagctctgggactggagggactgcaacctggaaacctgggagctctggacctggaagtactggaagctggaactctgggagctctggaactggaagtactggaaaccaaaaccctgggagccctagacctggtagtaccggaacctggaatcctggcagctctgaacgcggaagtgctgggcactggacctctgagagctctgtatctggtagtactggacaatggcactctgaatctggaagttttaggccagatagcccaggctctgggaacgcgaggcctaacaacccagactggggcacatttgaagaggtgtcaggaaatgtaagtccagggacaaggagagagtaccacacagaaaaactggtcacttctaaaggagataaagagctcaggactggtaaagagaaggtcacctctggtagcacaaccaccacgcgtcgttcatgctctaaaaccgttactaagactgttattggtcctgatggtcacaaagaagttaccaaagaagtggtgacctccgaagatggttctgactgtcccgaggcaatggatttaggcacattgtctggcataggtactctggatgggttccgccataggcaccctgatgaagctgccttcttcgacactgcctcaactggaaaaacattcccaggtttcttctcacctatgttaggagagtttgtcagtgagactgagtctaggggctcagaatctggcatcttcacaaatacaaaggaatccagttctcatcaccctgggatagctgaattcccttcccgtggtaaatcttcaagttacagcaaacaatttactagtagcacgagttacaacagaggagactccacatttgaaagcaagagctataaaatggcagatgaggccggaagtgaagccgatcatgaaggaacacatagcaccaagagaggccatgctaaatctcgccctgtcagagactgtgatgatgtcctccaaacacatccttcaggtacccaaagtggcattttcaatatcaagctaccgggatccagtaagattttttctgtttattgcgatcaagagaccagtttgggaggatggcttttgatccagcaaagaatggatggatcactgaattttaaccggacctggcaagactacaagagaggtttcggcagcctgaatgacgagggggaaggagaattctggctaggcaatgactacctccacttactaacccaaaggggctctgttcttagggttgaattagaggactgggctgggaatgaagcttatgcagaatatcacttccgggtaggctctgaggctgaaggctatgccctccaagtctcctcctatgaaggcactgcgggtgatgctctgattgagggttccgtagaggaaggggcagagtacacctctcacaacaacatgcagttcagcacctttgacagggatgcagaccagtgggaagagaactgtgcagaagtctatgggggaggctggtggtataataactgccaagcagccaatctcaatggaatctactaccctgggggctcctatgacccaaggaataacagtccttatgagattgagaatggagtggtctgggtttcctttagaggggcagattattccctcagggctgttcgcatgaaaattaggccccttgtgacccaataggctgaagaagtgggaatgggagcactctgtcttctttgctagagaagtggagagaaaatacaaaaggtaaagcagttgagattctctacaacctaaaaaattcctaggtgctattttcttatcctttgtactgtagctaaatgtacctgagacatattagtctttgaaaaataaagttatgtaaggttttttttatctttaaatagctctgtgggttttaacatttttataaagatataccaagggccattcagtacatcaggaaagtggcagacagaagcttctctctgcaaccttgaagactattggtttgagaacttctcttcccataccacccaaaatcataatgccattggaaagcaaaaagttgttttatccatttgatttgaattgttttaagccaatattttaaggtaaaactcactgaatctaaccatagctgacctttgtagtagaatttacaacttataattacaatgcacaatttataattacaatatgtatttatgtcttttgctatggagcaaatccaggaaggcaagagaaacattctttcctaaatataaatgaaaatctatcctttaaactcttccactagacgttgtaatgcacacttatttttttcccaaggagtaaccaatttctttctaaaacacatttaaaattttaaaactatttatgaatattaaaaaaagacataattcacacattaataaacaatctcccaagtattgatttaacttcatttttctaataatcataaactatattctgtgacatgctaattattattaaatgtaagtcgttagttcgaaagcctctcactaagtatgatctatgctatattcaaaattcaacccatttactttggtcaatatttgatctaagttgcatctttaatcctggtggtcttgccttctgatttttaatttgtatccttttctattaagatatatttgtcattttctcttgaatatgtattaaaatatcccaagcaaaaaaaaaaaaaaaa

SEQ ID NO: 606 - DNA, 4699 bp, Artificial Sequence
  GPM6B
gcgagctttgcctgcagactccgcgcgcccgctgcccccaatcgggccctagctccgggcgcacaaagcccccggcgctgacgtcagggcccctctccgcgcggccggcccccagtgcaggcggagccgcgccgcgctcccaccccggccgggagctaggagccagcggccagccccgcgcagcgcagcgcagcccgcagaagcccggtcagcgcacgtgcccgcgagacctgcaaacttgtgccaccggctctgcccgtccccggggagcccgaacgccccgcagccctcacccctcccgccagtctccagccatgggctgctttgaatgctgcatcaagtgtctgggaggagtcccctacgcctccctggtggccaccatcctctgcttctccggggtggccttattctgcggctgtgggcatgtggctctcgcaggcaccgtggcgattcttgagcaacacttctccaccaacgccagtgaccatgccttgctgagcgaggtgatacaactgatgcagtatgtcatctatggaattgcgtcctttttcttcttgtatgggatcattctgttggcagaaggcttttacaccacaagtgcagtgaaagaactgcacggtgagtttaaaacaaccgcttgtggccgatgcatcagtggaatgttcgttttcctcacctatgtgcttggagtggcctggctgggtgtgtttggtttctcagcggtgcccgtgtttatgttctacaacatatggtcaacttgtgaagtcatcaagtcaccgcagaccaacgggaccacgggtgtggagcagatctgtgtggatatccgacaatacggtatcattccttggaatgctttccccggaaaaatatgtggctctgccctggagaacatctgcaacacaaacgagttctacatgtcctatcacctgttcattgtggcctgtgcaggagctggtgccaccgtcattgccctgctgatctacatgatggctactacatataactatgcggttttgaagtttaagagtcgggaagattgctgcactaaattctaaattgcataaggagttttagagagctatgctctgtagcatgaaatatcactgacactccagactaaagcagagtctaggtttctgcaattttgttacagtaatttgtaaatagctttagtaaactcaccttgcatggtagattaataagatgacttactgtacatgaattacacaataatgagatctggtggctatttccacattttgaaaaggattcagttatttactgacagtggtgagcatcctttttaaaataatgttctcatacttaaacattagagagcagtatctttaaatgaattattaacactttggaatacttacattttctgttatttttgattgcctgataaccagtttcaatgatgaaaatgaaaacaagtgctgaagatgaaatggaagagaaccgttttaatctggattttgttttgtcacacctggaaaatactttgcaaatatgttctaaattgaaaacaatttttttatgatcacatggttcactaccaaatgaccctcaaataagccagatgaaaatttgaagaaaaaggtcacccagttctctggaaaaaaaaaaaaaaaaaaaaaaaaaaggatttatatgtgggtagttttttttttggtacaacacaatcattctgttagagcccacaaaattggtaaccttaaattgtgtgttttggtaagtaataactaactgtttcctcatagctagttctcaagctgcatgtaagattttaacgggaagagaaaataggcctggacctgaaggtctcaaatatgttgagaagaaagtatgaactataaggaacttgagatgtagatttattttgcaggaaatacgaggaaaataggaaagaagtgtttgccgcatcaagtgtaaagaatgatactgaggatttttacattttatgaaatgaaataatggcatttacaaaatgaaaaatgtagtttcacaactaagttttgttaacagagactgcatgctttgcttatagttcttaattttggttttgacattcatttaattttttccatgttaaatatgtagtttaattatttactcaaaataaacattgttcatgcttttaggcctttgggggaattgatttttatccacaggtagaaaatggtctttgcacacactacacttatttcaaatatacaatgtgctcccgaactttcgcattagtctttaaaattactctcaaaatggtattaaaaaaaaaaaaaaaagcaccctctcgtatttcatttttgctttttcttaacaatacctttggccatttttttccagttcactatgtttgtatactaacttttcttcagccttttaatgcgaagccaactagtagagcatgctttcaggatctgacagctctgctagtagagcgagtatttattaatacagaattaaccttcgcccctttaaagtcaagtctgtctaatctaactagcgcctcgctttgccttctcacaatgctcactagccatcatgctcacccttctcttccagatccacttcctcatgatactgtcttctaactgggcttacttaaaggatgcgagcaaaatgcaggcttaccaggatatcaaagcaaaggaagaacaggaactgcaagatatccagtctcggtcaaaagaacaactcaattcttacacataaatgtttgccagagtgtttcggccgacgtatttacagctctgacaaatcatcagacagctgctctgcagtacagatgtgtatcccaccaaactaatgtagatgtacaaacacttcactgtctgtctcaagctgctgggatgtatctctaggaaaaccttccagtgggtaaatctttttctttagaacaaatattggaggtttcatgttagccattttaaaaggcaacactttgacaaaatgatcgttcatactttgggaatttgtggcatgttcacatttattgctagggcaattctaccaagacactcaatggaatatgtcacactccttaatagggacctgtgactccttaataaggacctgtgacatgcccagcatcaagggataagaccgtaaattcacatatatgccatctgtcctcaagtgttatctacataggaaataaaatggaattgatgtaaagttccatttctgacagctgacatttattaaactttggatcaaagataatgtgattcttatgattgatttctcaaactagcttttccctcccaagtccaggacccattaatttcctgagccaatcagaaatatatttttcaataatgctaaaattagctacaattctgctgaccctactattaaagaatctggatgctggactcactgacaagctttccagaagcaattttataacagatttcattttaacaaaatactgatccaattttcattattcttgagaaatgtcagctttgccttaatgagtatttgctttaaatttctaagaatttatatcataactagagacccaaatatctttcacagaattttgttccataaatgtttttcttaattattaagaagtgttaccttattaaaatgaccaccattctaaaccatttttcagtggtctggatacgaagtttacagtttcataccaactatctaaaacctaattgcaaattgaccacagacctctaacctcctacttttatagacttgaatacttaagtaatttaaattagggttggtatttcatttttttcttatctaaatcttagtttcctggaataataaagtttgatgttcagcaagagaactgcttgagtttaagccattttcaaaagaaacttgccttttacattattgtgttccagaacattaagtgactgtaggtactgggtattagtgatggtaaactttgtgttgctctttatgaaatgatccatataactgttgggtgcatcagtgcttttcaaaggggctgcttactatagggttaactatgtatattcattgttaagagttaacttgtggtttggctgtttcctggattttataacatacatgtgcagaaatgtattcaaatgaaaggaagcatacctttatcaagatgctattaaaattgaacatcaagtataatatttcatttggattctcttttttggttaatgcctaaaaatgcctatttgggatttttttttttttttaaattaagagaagctctcttctgtgtagaacagttgttccaaaatagcttagtgttttgttttcctgttgcatgacagatttaactattctttccagcagtggaggtgctgtcagagtccagtgttctagaagaggcagtgtctaaagcctaattttacttttctaattctggtagctattaccaggaatttttgaaagttttgtttaagtagtctaatattttttatgtaaagagcattaaattttgctatgtataaatttttgtaacctaacagtgaatcaatattttctatcagtgccaagggcttcctgtagttctattcaagtgttacaataaatatttgtagataatagtcaatacttgtgtatgcttattttaaagatctatttaggtggaaatagttgtggatgtactaagagtaatgaaataaaattatagcttcattcacttgcctttttaccataaaaaaaaaaaaaaaaaaaaaaa

SEQ ID NO: 607 - DNA, 8005 bp, Artificial Sequence
  DSP
aagaaaccggccaggtgtggcctaggcgcccagtgccagcggggaggagactcgctccgccgccgaccaacaccaacacccagctccgacgcagctcctctgcgcccttgccgccctccgagccacagctttcctcccgctcctgcccccggcccgtcgccgtctccgcgctcgcagcggcctcgggagggcccaggtagcgagcagcgacctcgcgagccttccgcactcccgcccggttccccggccgtccgcctatccttggccccctccgctttctccgcgccggcccgcctcgcttatgcctcggcgctgagccgctctcccgattgcccgccgacatgagctgcaacggaggctcccacccgcggatcaacactctgggccgcatgatccgcgccgagtctggcccggacctgcgctacgaggtgaccagcggcggcgggggcaccagcaggatgtactattctcggcgcggcgtgatcaccgaccagaactcggacggctactgtcaaaccggcacgatgtccaggcaccagaaccagaacaccatccaggagctgctgcagaactgctccgactgcttgatgcgagcagagctcatcgtgcagcctgaattgaagtatggagatggaatacaactgactcggagtcgagaattggatgagtgttttgcccaggccaatgaccaaatggaaatcctcgacagcttgatcagagagatgcggcagatgggccagccctgtgatgcttaccagaaaaggcttcttcagctccaagagcaaatgcgagccctttataaagccatcagtgtccctcgagtccgcagggccagctccaagggtggtggaggctacacttgtcagagtggctctggctgggatgagttcaccaaacatgtcaccagtgaatgtttggggtggatgaggcagcaaagggcggagatggacatggtggcctggggtgtggacctggcctcagtggagcagcacattaacagccaccggggcatccacaactccatcggcgactatcgctggcagctggacaaaatcaaagccgacctgcgcgagaaatctgcgatctaccagttggaggaggagtatgaaaacctgctgaaagcgtcctttgagaggatggatcacctgcgacagctgcagaacatcattcaggccacgtccagggagatcatgtggatcaatgactgcgaggaggaggagctgctgtacgactggagcgacaagaacaccaacatcgctcagaaacaggaggccttctccatacgcatgagtcaactggaagttaaagaaaaagagctcaataagctgaaacaagaaagtgaccaacttgtcctcaatcagcatccagcttcagacaaaattgaggcctatatggacactctgcagacgcagtggagttggattcttcagatcaccaagtgcattgatgttcatctgaaagaaaatgctgcctactttcagttttttgaagaggcgcagtctactgaagcatacctgaaggggctccaggactccatcaggaagaagtacccctgcgacaagaacatgcccctgcagcacctgctggaacagatcaaggagctggagaaagaacgagagaaaatccttgaatacaagcgtcaggtgcagaacttggtaaacaagtctaagaagattgtacagctgaagcctcgtaacccagactacagaagcaataaacccattattctcagagctctctgtgactacaaacaagatcagaaaatcgtgcataagggggatgagtgtatcctgaaggacaacaacgagcgcagcaagtggtacgtgacgggcccgggaggcgttgacatgcttgttccctctgtggggctgatcatccctcctccgaacccactggccgtggacctctcttgcaagattgagcagtactacgaagccatcttggctctgtggaaccagctctacatcaacatgaagagcctggtgtcctggcactactgcatgattgacatagagaagatcagggccatgacaatcgccaagctgaaaacaatgcggcaggaagattacatgaagacgatagccgaccttgagttacattaccaagagttcatcagaaatagccaaggctcagagatgtttggagatgatgacaagcggaaaatacagtctcagttcaccgatgcccagaagcattaccagaccctggtcattcagctccctggctatccccagcaccagacagtgaccacaactgaaatcactcatcatggaacctgccaagatgtcaaccataataaagtaattgaaaccaacagagaaaatgacaagcaagaaacatggatgctgatggagctgcagaagattcgcaggcagatagagcactgcgagggcaggatgactctcaaaaacctccctctagcagaccagggatcttctcaccacatcacagtgaaaattaacgagcttaagagtgtgcagaatgattcacaagcaattgctgaggttctcaaccagcttaaagatatgcttgccaacttcagaggttctgaaaagtactgctatttacagaatgaagtatttggactatttcagaaactggaaaatatcaatggtgttacagatggctacttaaatagcttatgcacagtaagggcactgctccaggctattctccaaacagaagacatgttaaaggtttatgaagccaggctcactgaggaggaaactgtctgcctggacctggataaagtggaagcttaccgctgtggactgaagaaaataaaaaatgacttgaacttgaagaagtcgttgttggccactatgaagacagaactacagaaagcccagcagatccactctcagacttcacagcagtatccactttatgatctggacttgggcaagttcggtgaaaaagtcacacagctgacagaccgctggcaaaggatagataaacagatcgactttaggttatgggacctggagaaacaaatcaagcaattgaggaattatcgtgataactatcaggctttctgcaagtggctctatgatgctaaacgccgccaggattccttagaatccatgaaatttggagattccaacacagtcatgcggtttttgaatgagcagaagaacttgcacagtgaaatatctggcaaacgagacaaatcagaggaagtacaaaaaattgctgaactttgcgccaattcaattaaggattatgagctccagctggcctcatacacctcaggactggaaactctgctgaacatacctatcaagaggaccatgattcagtccccttctggggtgattctgcaagaggctgcagatgttcatgctcggtacattgaactacttacaagatctggagactattacaggttcttaagtgagatgctgaagagtttggaagatctgaagctgaaaaataccaagatcgaagttttggaagaggagctcagactggcccgagatgccaactcggaaaactgtaataagaacaaattcctggatcagaacctgcagaaataccaggcagagtgttcccagttcaaagcgaagcttgcgagcctggaggagctgaagagacaggctgagctggatgggaagtcggctaagcaaaatctagacaagtgctacggccaaataaaagaactcaatgagaagatcacccgactgacttatgagattgaagatgaaaagagaagaagaaaatctgtggaagacagatttgaccaacagaagaatgactatgaccaactgcagaaagcaaggcaatgtgaaaaggagaaccttggttggcagaaattagagtctgagaaagccatcaaggagaaggagtacgagattgaaaggttgagggttctactgcaggaagaaggcacccggaagagagaatatgaaaatgagctggcaaaggcatctaataggattcaggaatcaaagaatcagtgtactcaggtggtacaggaaagagagagccttctggtgaaaatcaaagtcctggagcaagacaaggcaaggctgcagaggctggaggatgagctgaatcgtgcaaaatcaactctagaggcagaaaccagggtgaaacagcgcctggagtgtgagaaacagcaaattcagaatgacctgaatcagtggaagactcaatattcccgcaaggaggaggctattaggaagatagaatcggaaagagaaaagagtgagagagagaagaacagtcttaggagtgagatcgaaagactccaagcagagatcaagagaattgaagagaggtgcaggcgtaagctggaggattctaccagggagacacagtcacagttagaaacagaacgctcccgatatcagagggagattgataaactcagacagcgcccatatgggtcccatcgagagacccagactgagtgtgagtggaccgttgacacctccaagctggtgtttgatgggctgaggaagaaggtgacagcaatgcagctctatgagtgtcagctgatcgacaaaacaaccttggacaaactattgaaggggaagaagtcagtggaagaagttgcttctgaaatccagccattccttcggggtgcaggatctatcgctggagcatctgcttctcctaaggaaaaatactctttggtagaggccaagagaaagaaattaatcagcccagaatccacagtcatgcttctggaggcccaggcagctacaggtggtataattgatccccatcggaatgagaagctgactgtcgacagtgccatagctcgggacctcattgacttcgatgaccgtcagcagatatatgcagcagaaaaagctatcactggttttgatgatccattttcaggcaagacagtatctgtttcagaagccatcaagaaaaatttgattgatagagaaaccggaatgcgcctgctggaagcccagattgcttcagggggtgtagtagaccctgtgaacagtgtctttttgccaaaagatgtcgccttggcccgggggctgattgatagagatttgtatcgatccctgaatgatccccgagatagtcagaaaaactttgtggatccagtcaccaaaaagaaggtcagttacgtgcagctgaaggaacggtgcagaatcgaaccacatactggtctgctcttgctttcagtacagaagagaagcatgtccttccaaggaatcagacaacctgtgaccgtcactgagctagtagattctggtatattgagaccgtccactgtcaatgaactggaatctggtcagatttcttatgacgaggttggtgagagaattaaggacttcctccagggttcaagctgcatagcaggcatatacaatgagaccacaaaacagaagcttggcatttatgaggccatgaaaattggcttagtccgacctggtactgctctggagttgctggaagcccaagcagctactggctttatagtggatcctgttagcaacttgaggttaccagtggaggaagcctacaagagaggtctggtgggcattgagttcaaagagaagctcctgtctgcagaacgagctgtcactgggtataatgatcctgaaacaggaaacatcatctctttgttccaagccatgaataaggaactcatcgaaaagggccacggtattcgcttattagaagcacagatcgcaaccggggggatcattgacccaaaggagagccatcgtttaccagttgacatagcatataagaggggctatttcaatgaggaactcagtgagattctctcagatccaagtgatgataccaaaggattttttgaccccaacactgaagaaaatcttacctatctgcaactaaaagaaagatgcattaaggatgaggaaacagggctctgtcttctgcctctgaaagaaaagaagaaacaggtgcagacatcacaaaagaataccctcaggaagcgtagagtggtcatagttgacccagaaaccaataaagaaatgtctgttcaggaggcctacaagaagggcctaattgattatgaaaccttcaaagaactgtgtgagcaggaatgtgaatgggaagaaataaccatcacgggatcagatggctccaccagggtggtcctggtagatagaaagacaggcagtcagtatgatattcaagatgctattgacaagggccttgttgacaggaagttctttgatcagtaccgatccggcagcctcagcctcactcaatttgctgacatgatctccttgaaaaatggtgtcggcaccagcagcagcatgggcagtggtgtcagcgatgatgtttttagcagctcccgacatgaatcagtaagtaagatttccaccatatccagcgtcaggaatttaaccataaggagcagctctttttcagacaccctggaagaatcgagccccattgcagccatctttgacacagaaaacctggagaaaatctccattacagaaggtatagagcggggcatcgttgacagcatcacgggtcagaggcttctggaggctcaggcctgcacaggtggcatcatccacccaaccacgggccagaagctgtcacttcaggacgcagtctcccagggtgtgattgaccaagacatggccaccaggctgaagcctgctcagaaagccttcataggcttcgagggtgtgaagggaaagaagaagatgtcagcagcagaggcagtgaaagaaaaatggctcccgtatgaggctggccagcgcttcctggagttccagtacctcacgggaggtcttgttgacccggaagtgcatgggaggataagcaccgaagaagccatccggaaggggttcatagatggccgcgccgcacagaggctgcaagacaccagcagctatgccaaaatcctgacctgccccaaaaccaaattaaaaatatcctataaggatgccataaatcgctccatggtagaagatatcactgggctgcgccttctggaagccgcctccgtgtcgtccaagggcttacccagcccttacaacatgtcttcggctccggggtcccgctccggctcccgctcgggatctcgctccggatctcgctccgggtcccgcagtgggtcccggagaggaagctttgacgccacagggaattcttcctactcttattcctactcatttagcagtagttctattgggcactagtagtcagttgggagtggttgctataccttgacttcatttatatgaatttccactttattaaataatagaaaagaaaatcccggtgcttgcagtagagtgataggacattctatgcttacagaaaatatagccatgattgaaatcaaatagtaaaggctgttctggctttttatcttcttagctcatcttaaataagcagtacacttggatgcagtgcgtctgaagtgctaatcagttgtaacaatagcacaaatcgaacttaggatttgtttcttctcttctgtgtttcgatttttgatcaattctttaattttggaagcctataatacagttttctattcttggagataaaaattaaatggatcactgatattttagtcattctgcttctcatctaaatatttccatattctgtattaggagaaaattaccctcccagcaccagcccccctctcaaacccccaacccaaaaccaagcattttggaatgagtctcctttagtttcagagtgtggattgtataacccatatactcttcgatgtacttgtttggtttggtattaatttgactgtgcatgacagcggcaatcttttctttggtcaaagttttctgtttattttgcttgtcatattcgatgtactttaaggtgtctttatgaagtttgctattctggcaataaacttttagacttttgaagtgtttgtgttttaatttaatatgtttataagcatgtataaacatttagcatatttttatcataggtctaaaaatatttgtttactaaatacctgtgaagaaataccattaaaaaactatttggttctgaattcttactagaaaaaaaa

SEQ ID NO: 608 - DNA, 6833 bp, Artificial Sequence
  OPCML
tccttccgtcgctcaggagagtggagccaatgcgtgccttggaggactgctctgagccctgtgcagattggtgctgatgattcttaccagttgtgtgcaagaaaagaaatcagagacgctgcctgcctgctcccatctctcgcgcgctctctctctcttctgctctctccctccctttgcaaacattggatttaaacctgctcagaattcagcacagaggaaggcagcagcggtagcagcagcagaagcagtagcaagcccggcagctgagagcaccgcagcgtcgagatgtaccatcctgcctactgggtcgtcttctcggcgacaactgccctgctcttcatcccaggagtgcccgtgcgcagcggagatgccaccttccccaaagctatggacaacgtgacggtccggcagggggagagcgccaccctcaggtgtaccatagatgaccgggtaacccgggtggcctggctaaaccgcagcaccatcctctacgctgggaatgacaagtggtccatagaccctcgtgtgatcatcctggtcaatacaccaacccagtacagcatcatgatccaaaatgtggatgtgtatgacgaaggtccgtacacctgctctgtgcagacagacaatcatcccaaaacgtcccgggttcacctaatagtgcaagttcctcctcagatcatgaatatctcctcagacatcactgtgaatgagggaagcagtgtgaccctgctgtgtcttgctattggcagaccagagccaactgtgacatggagacacctgtcagtcaaggaaggccagggctttgtaagtgaggatgagtacctggagatctctgacatcaagcgagaccagtccggggagtacgaatgcagcgcgttgaacgatgtcgctgcgcccgatgtgcggaaagtaaaaatcactgtaaactatcctccctatatctcaaaagccaagaacactggtgtttcagtcggtcagaagggcatcctgagctgtgaagcctctgcagtccccatggctgaattccagtggttcaaggaagaaaccaggttagccactggtctggatggaatgaggattgaaaacaaaggccgcatgtccactctgactttcttcaatgtttcagaaaaggattatgggaactatacttgtgtggccacgaacaagcttgggaacaccaatgccagcatcacattgtatgggcctggagcagtcattgatggtgtaaactcggcctccagagcactggcttgtctctggctatcagggaccctcttagcccacttcttcatcaagttttgataagaaatcctaggtcctctgagcaacgcctgcttctccatatcacagactttaatctacactgcggagagcaaaccagcttgggcttctttttgtttttttctgttattctagatttgttttctttttgtttttgtttatttgtttgtttgcttttatttccagcttgaatgagtggggttgggggcggggtgggcagggttctaccacgtgtaggataatcattcattggtgtgtccaaaaatggggtctgctcctgctaccttgacccttccctttcctctgcttctctcctcatcatcattcccaacaacatcctctgccacacacaacaaaacgtaagtttcatttgggcaaaaattgagcctcacaataaacaccctgaagacacaacttgacttataacatagtgcacagcaagagctacatccaagtgtcctattatctgtgattattttcttaatgacaatgtacatatgcccccatccatgttaattattatctaattccattagggttcacgtcttttctttctgggacactatcctactatatccatatctatagatttcaatatagatgattgtgccatcttctgtagcccctccgctctactcattccttccaccatctgcagagatttgaagtttggggctatgcatgaaacccaacactaaattttgcaagtcaagtaaccaaaaaagggggaggcattttgaagatagaacctctattttaaaaagagaagttcaactcataaacgtgattgataggtggctgatttatttaggttttgtcaagctatctatcaaagtaatggtacagttacccatctactcaaatatctgatttatctcaccatccaattatctacccacctgtcttcctctctagcaatctatttactgtttatcaatctatcaatgtaattgtctaacactcctttctattctctccctactactcactatcaattcatccccatatgaatctctaaccatattgtatctctcccactgtattcatttatacaccatcagcagacattggcatcttcaaaattatctttcaacttctgtgaaagccaacgatctcacaggttaacaaaatacaaaagcaataccctgtgttgtggactctttaaaatctggtatcctatccacccaagggagacactaacagataggccaaagtagcaagctaatgatcagtcactcactattcccagaagagcctgtgttttctaaaacactttcttgggaagcagatcagcctagaaaagttttgattagcactgtggttttccttttgcacttgaaggacaaaggtgccagcctttatgcttctctcaacccttcaagaaagtacatgtcaggaacctatggctggctttccttagcagcaagaacttgagagaaaaacacatctgtctctgcaatgcaaagtgaagagtccacccgcctgagtgggatgacttcagctagagtctcctttctgctccagttctggtttaatctgtttgaaaactatccagtaaaaagctgatggaggccaattacatggcgggtgtattgacaactctggtatttgtttcaggaagctcttctaagctgagggcacttgagcaactgacttaattttcaagcacttgattaacacaacactgcaaacagaagggagaaagtgtcagtgacacagtttcctctgatgcagctgcttctccaatggctttggggaagaacttcaccagctcttcaggttcaaagcagacccagcatacaaacaagagctgagccacctttgctgtcttgtctcctgggacgagaaggactcatccagcaaagttgcctgggattcaaaataaaggcattgcagaccgcacaggtgtgctgcagggactgatccacagagaggatgagaatgcagcatcaatcgcagacctgccctgcctcagttggaaaaccttttcaggccctcagtctaaaaaataaaaaatatgagcaccattgaattctgtgcccttaatgcttaactggtcttcttcctctggtatcagtgtcctctttgtttttgtccatcaaggcacatgagtgtgacctctgccatggggaaacacacacagagatatctatacatatatacatacatacaaacataggctatcttggcacactaaatgctaagcactgtcttaagaggtagagctggtgtgagtgaaattaatgttacattttccagctgtaaacagacatctgcatttcctagtgagctgccaggagccagattcgggaaccgtaactgatgtgccaggaatggtgcattgattcccagttccagggatgatcatgagcaggcgcaaaatcagaattaaaggtcgcacatagacgtttcagatctgtcaccaccttcagcatctggagttgagttggtgtcagatagtgtatgagaattaaatgtgtcatctgagcatgctactgatgataaatttgttactttggagttgaataaatgtgaaggctgtgaagagtggacagtcttggagaacacagtgcttgaaatggacaagctggacctattcctcactccaagacttgttctacaggaaagggtccatgctcctttggccaagatcatcagaacctctcaacccaacaaggctggcttcagggccactatggaaccctgctgttcccccttccaaaggatactaagatgcccctctggtgggtacctatcccagccacgtttcagagggagagaaatgctacagttgatcctcatctgtctggggtaaagacaacaaagtaaatacaacccaaggcaactggggtactcactgggagtgaaaatgacttcttcacaacagacatatttctgcttctgtgtttttgtgtttctttggtggggatggcttcatgggagagtggctgtcacccatcattttgaagcatatagaacaacaaatgcttacacaagacaatatccacacttttccaacttcacacacggagagtacatggagaatgcctacaggctagatttgttcagggtgccagtagtgggcatggggtgggggcaaggcaggacaaaacatacaagtctgagcaagtacatctcttgcaggttttccacatgaaaaggaagccaaataagtcctgttaggagattaggtgagaggaattagcaatgtagggactctgaaacccttccccttcccaaaacagagttcatatgcacttccaccaaagtaatgccaatgaaagtgctcgtgttaaggctgcagccaagcttgtttttcagtagtttaatgtcaagtgcctgatacagtcgactgcaagtctaaacaagcatgtttagtttttctcattcttgctttaattcagggagggggagatgtagagaagtggttgtgaaaacatgtacaggctttatgcagagcactgcgcatggctgttctgctgcaactgtgctccacgaaacagaagaaaaggtaaggtgttgtgtcacaaagaggccccagtctctttcttcttacatccatgcctcttactagatgatacatttacagattgggcagtttgttctcaaaacctgggtgagaagactattcctggactctagcaacttcaaaactgaggctgggtttcagaatctttttctgcatcaattcagtcaatttgccttcaacaaagagaagtcagcaagttctatttatgctgaaagaactattccatgagaaaagcagagaaccccaaagtgggcaggcaaccccgacgagagcttatccctgtggcggcatcaggagtggctgtacattgaattttcaagtgctggttggctgtcgccagcccatggtaggaggggaggaatggcttaagatgaggtaagatctggtggtggggcatctttcctcaattccatactgactttgatcttgagaaagaaaaactggctatgcattacctaaaaccagtccaaaatgaaacagaccaacacacacacaaaagcaaattgtcaatccctttggaattaagggaagcagcataaggtttttctttttggaaaaaatgcatttattttctttttctccaacagcaagaatcttttgttttcattttgcacgtgaccttatcttggaaactcttatacccaattgcctcccctcctattattcagagcttccctgtctttttacttgaagacaaataagtttgagcacttgagtaaaacttcacaggtgtgtaagtaggaaggcaacattttcaaaaagagaccatatgatgagaacgcctaatgatcaccacatgcaaacaaacaaaactgccagtctcatttcccacatttcttacttaagagaagagaagtaaatgaaaggaagaagaaatagatttgtaattaaagatgtggcaaaaaagatagggctgagccagttcaatttagccttcaggtgcagaatacttagagtccaaagaaatgtggagtggacttaattagatgcagttgtctttatcctgaaagtagtgagctaagcctaatttccagcattttgaaagagattcctttttgtttctttccatggtgccctctttaaggcacagagttgctccacaccactgggtggagaaagaaagattgcgaaccctcgaccatccttttgaggctacattctatgttatttggcagatttataaagctatcagtaataacaatgctatgtactgcaagctgcccttgtgttagttaaagggagcatttttaatcgttcggaaattttcgtgacatgtcaagtgcagttgtgaggactgtgtgggtgaacgaaaatgtgtctgtcaagttcagagtcctttagatttaaaaaaaaattatgacttatcaatggtgccgttatagctgtgtcagacaatgggtgtgcccattctcacaattatccttcaaaaaaaatctatgttcaaatgctttaaaaatttatcacacgatacaagagtatgactttgtcagccttctagagttctttttttcttttattttctttcgtattttttccttcaaaaaatcaatgaagacttgatttctgtcaataattgtatcaagggtgaatatactacctgaattttgtgcatgttacattgtagttgtaaccttttctaattcaggatgaatacgagatggttgtgattgtgcagtgtaccaataaagttcgagaaatttgtaacttttggggggctgtttattaggacatctcattgatatccaggacgggaaaaatatgaagcgagctctgcttctcccatatgtgcgtttttggccctggagagtagatgcactcagaaagcctggagctgcaccccccacctctctctctccctccttctctctctcgcacacactgtagaaagcagccttagcactgtccgtatgacatttgtatatcaaagatctatgctgtttacaaacaatataaaatgtagctgcagcctcaaagtctaaattgtttgttggtgtaggcgaaaacgaaagcagaagagaag

SEQ ID NO: 609 - DNA, 2591 bp, Artificial Sequence
  ALOX5
ggggccgggaccggggccagggaccagtggtgggaggaggctgcggcgctagatgcggacacctggaccgccgcgccgaggctcccggcgctcgctgctcccgcggcccgcgccatgccctcctacacggtcaccgtggccactggcagccagtggttcgccggcactgacgactacatctacctcagcctcgtgggctcggcgggctgcagcgagaagcacctgctggacaagcccttctacaacgacttcgagcgtggcgcggtggattcatacgacgtgactgtggacgaggaactgggcgagatccagctggtcagaatcgagaagcgcaagtactggctgaatgacgactggtacctgaagtacatcacgctgaagacgccccacggggactacatcgagttcccctgctaccgctggatcaccggcgatgtcgaggttgtcctgagggatggacgcgcaaagttggcccgagatgaccaaattcacattctcaagcaacaccgacgtaaagaactggaaacacggcaaaaacaatatcgatggatggagtggaaccctggcttccccttgagcatcgatgccaaatgccacaaggatttaccccgtgatatccagtttgatagtgaaaaaggagtggactttgttctgaattactccaaagcgatggagaacctgttcatcaaccgcttcatgcacatgttccagtcttcttggaatgacttcgccgactttgagaaaatctttgtcaagatcagcaacactatttctgagcgggtcatgaatcactggcaggaagacctgatgtttggctaccagttcctgaatggctgcaaccctgtgttgatccggcgctgcacagagctgcccgagaagctcccggtgaccacggagatggtagagtgcagcctggagcggcagctcagcttggagcaggaggtccagcaagggaacattttcatcgtggactttgagctgctggatggcatcgatgccaacaaaacagacccctgcacactccagttcctggccgctcccatctgcttgctgtataagaacctggccaacaagattgtccccattgccatccagctcaaccaaatcccgggagatgagaaccctattttcctcccttcggatgcaaaatacgactggcttttggccaaaatctgggtgcgttccagtgacttccacgtccaccagaccatcacccaccttctgcgaacacatctggtgtctgaggtttttggcattgcaatgtaccgccagctgcctgctgtgcaccccattttcaagctgctggtggcacacgtgagattcaccattgcaatcaacaccaaggcccgtgagcagctcatctgcgagtgtggcctctttgacaaggccaacgccacagggggcggtgggcacgtgcagatggtgcagagggccatgaaggacctgacctatgcctccctgtgctttcccgaggccatcaaggcccggggcatggagagcaaagaagacatcccctactacttctaccgggacgacgggctcctggtgtgggaagccatcaggacgttcacggccgaggtggtagacatctactacgagggcgaccaggtggtggaggaggacccggagctgcaggacttcgtgaacgatgtctacgtgtacggcatgcggggccgcaagtcctcaggcttccccaagtcggtcaagagccgggagcagctgtcggagtacctgaccgtggtgatcttcaccgcctccgcccagcacgccgcggtcaacttcggccagtacgactggtgctcctggatccccaatgcgcccccaaccatgcgagccccgccaccgactgccaagggcgtggtgaccattgagcagatcgtggacacgctgcccgaccgcggccgctcctgctggcatctgggtgcagtgtgggcgctgagccagttccaggaaaacgagctgttcctgggcatgtacccagaagagcattttatcgagaagcctgtgaaggaagccatggcccgattccgcaagaacctcgaggccattgtcagcgtgattgctgagcgcaacaagaagaagcagctgccatattactacttgtccccagaccggattccgaacagtgtggccatctgagcacactgccagtctcactgtgggaaggccagctgccccagccagatggactccagcctgcctggcaggctgtctggccaggcctcttggcagtcacatctcttcctccgaggccagtacctttccatttattctttgatcttcagggaactgcatagattgatcaaagtgtaaacaccatagggacccattctacacagagcaggactgcacagcgtcctgtccacacccagctcagcatttccacaccaagcagcaacagcaaatcacgaccactgatagatgtctattcttgttggagacatgggatgattattttctgttctatttgtgcttagtccaattccttgcacatagtaggtacccaattcaattactattgaatgaattaagaattggttgccataaaaataaatcagttcatttaaaatgaaaaaaaaaaaaaaaaaaaa

SEQ ID NO: 610 - DNA, 2517 bp, Artificial Sequence
  APLP1
actctgcgcgaagccgccacgctattgtcctgaccaggaaggcggggccggcgcggggcggggctggcggcgccggcgcagcccgggggcggcgggaggaggaggtggcggcggtggcgctgggagctcctgtcaccgctggggccgggccgggcgggagtgcaggggacgtgagggcgcaagggccgggacatggggcccgccagccccgctgctcgcggtctaagtcgccgcccgggccagccgccgctgccgctgctgctgccactattgctgctgcttctgcgcgcgcagcccgccatcgggagcctggccggtgggagccccggcgcggccgaggccccggggtcggcccaggtggctggactatgcgggcgcctaacccttcaccgggacctgcgcaccggccgctgggaaccagacccacagcgctctcgacgctgtctccgggacccgcagcgcgtgctggagtactgcagacagatgtacccggagctgcagattgcacgtgtggagcaggctacgcaggccatccccatggagcgctggtgcgggggttcccggagcggcagctgcgcccacccccaccaccaggttgtgcccttccgctgcctgcctggtgaatttgtgagtgaggccctgctggtgcctgaaggctgccggttcttgcaccaggagcgcatggaccaatgtgagagttcaacccggaggcatcaggaggcacaggaggcctgcagctcccagggcctcatcctgcacggctcgggcatgctcttaccctgtggctcggatcggttccgtggtgtggagtatgtgtgctgtccccctccagggacccccgacccatctgggacagcagttggtgacccctccacccggtcctggcccccggggagcagagtagagggggctgaggacgaggaagaggaggaatccttcccacagccagtagatgattacttcgtggagcctccgcaggctgaagaggaagaggaaacggtcccacccccaagctcccatacacttgcagtggtcggcaaagtcactcccaccccgaggcccacagacggtgtggatatttactttggcatgcctggggaaatcagtgagcacgaggggttcctgagggccaagatggacctggaggagcgtaggatgcgccagattaatgaggtgatgcgtgaatgggccatggcagacaaccagtccaagaacctgcctaaagccgacagacaggccctgaatgagcacttccagtccattctgcagactctggaggagcaggtgtctggtgagcgacagcgcctggtggaaacccacgccacccgcgtcatcgcccttatcaacgaccagcgccgggctgccttggagggcttcctggcagccctgcaggcagatccgcctcaggcggagcgtgtcctgttggccctgcggcgctacctgcgtgcggagcagaaggaacagaggcacacgctgcgccactaccagcatgtggccgccgtggatcccgagaaggcacagcagatgcgcttccaggtgcatacccaccttcaagtgattgaggagagggtgaatcagagcctgggcctgcttgaccagaacccccacctggctcaggagctgcggccccaaatccaggaactcctccactctgaacacctgggtcccagtgaattggaagcccctgcccctgggggcagcagcgaggacaagggtgggctgcagcctccagattccaaggatgcagacacccccatgacccttccaaaagggtccacagaacaagatgctgcatcccctgagaaagagaagatgaacccgctggaacagtatgagcgaaaggtgaatgcgtctgttccaaggggtttccctttccactcatcggagattcagagggatgagctggcaccagctgggacaggggtgtcccgtgaggctgtgtcgggtctgctgatcatgggagcgggcggaggctccctcatcgtcctctccatgctgctcctgcgcaggaagaagccctacggggctatcagccatggcgtggtggaggtggaccccatgctgaccctggaggagcagcagctccgcgaactgcagcggcacggctatgagaaccccacttaccgcttcctggaggaacgaccctgacccggcccccttcaccccttcagccgagcccagacctcccctcttcctggagccccagaaccccaactcccagcctagggcagcagggagtcttgaagtgatcatttcacacccttttgtgagacggctggaaattcttatttcccctttccaattccaaaattccatccctaagaattcccagatagtcccagcagcctccccacgtggcacctcctcaccttaatttattttttaagtttatttatggctctttaaggtgaccgccaccttggtcctagtgtctattccctggaattcaccctctcatgtttccctactaacatcccaataaagtcctcttccctaccaggccaaaaaaaaaaaaaa

SEQ ID NO: 611 - DNA, 1510 bp, Artificial Sequence
  PNLIP
tctggttgcgtgtggaacctgacggaactgccacgatgctgccactttggactctttcactgctgctgggagcagtagcaggaaaagaagtttgctacgaaagactcggctgcttcagtgatgactccccatggtcaggaattacggaaagacccctccatatattgccttggtctccaaaagatgtcaacacccgcttcctcctatatactaatgagaacccaaacaactttcaagaagttgccgcagattcatcaagcatcagtggctccaatttcaaaacaaatagaaaaactcgctttattattcatggattcatagacaagggagaagaaaactggctggccaatgtgtgcaagaatctgttcaaggtggaaagtgtgaactgtatctgtgtggactggaaaggtggctcccgaactggatacacacaagcctcgcagaacatcaggatcgtgggagcagaagtggcatattttgttgaatttcttcagtcggcgttcggttactcaccttccaacgtgcatgtcattggccacagcctgggtgcccacgctgctggggaggctggaaggagaaccaatgggaccattggacgcatcacagggttggacccagcagaaccttgctttcagggcacacctgaattagtccgattggaccccagcgatgccaaatttgtggatgtaattcacacggatggtgcccccatagtccccaatttggggtttggaatgagccaagtcgtgggccacctagatttctttccaaatggaggagtggaaatgcctggatgtaaaaagaacattctctctcagattgtggacatagacggaatctgggaagggactcgagactttgcggcctgtaatcacttaagaagctacaaatattacactgatagcatcgtcaaccctgatggctttgctggattcccctgtgcctcttacaacgtcttcactgcaaacaagtgtttcccttgtccaagtggaggctgcccacagatgggtcactatgctgatagatatcctgggaaaacaaatgatgtgggccagaaattttatctagacactggtgatgccagtaattttgcacgttggaggtataaggtatctgtcacactgtctggaaaaaaggttacaggacacatactagtttctttgttcggaaataaaggaaactctaagcagtatgaaattttcaagggcactctcaaaccagatagtactcattccaatgaatttgactcagatgtggatgttggggacttgcagatggttaaatttatttggtataacaatgtgatcaacccaactttacctagagtgggagcatccaagattatagtggagacaaatgttggaaaacagttcaacttctgtagtccagaaaccgtcagggaggaagttctgctcaccctcacaccgtgttaggagactactgttatttgaccaatgaattgacttctaataaaatctagtggtgatgcattaaaaaaaaaaaaaaaaaa

SEQ ID NO: 612 - DNA, 2335 bp, Artificial Sequence
  ALB
aattattggttaaagaagtatattagtgctaatttccctccgtttgtcctagcttttctcttctgtcaaccccacacgcctttggcacaatgaagtgggtaacctttatttcccttctttttctctttagctcggcttattccaggggtgtgtttcgtcgagatgcacacaagagtgaggttgctcatcggtttaaagatttgggagaagaaaatttcaaagccttggtgttgattgcctttgctcagtatcttcagcagtgtccatttgaagatcatgtaaaattagtgaatgaagtaactgaatttgcaaaaacatgtgttgctgatgagtcagctgaaaattgtgacaaatcacttcataccctttttggagacaaattatgcacagttgcaactcttcgtgaaacctatggtgaaatggctgactgctgtgcaaaacaagaacctgagagaaatgaatgcttcttgcaacacaaagatgacaacccaaacctcccccgattggtgagaccagaggttgatgtgatgtgcactgcttttcatgacaatgaagagacatttttgaaaaaatacttatatgaaattgccagaagacatccttacttttatgccccggaactccttttctttgctaaaaggtataaagctgcttttacagaatgttgccaagctgctgataaagctgcctgcctgttgccaaagctcgatgaacttcgggatgaagggaaggcttcgtctgccaaacagagactcaagtgtgccagtctccaaaaatttggagaaagagctttcaaagcatgggcagtagctcgcctgagccagagatttcccaaagctgagtttgcagaagtttccaagttagtgacagatcttaccaaagtccacacggaatgctgccatggagatctgcttgaatgtgctgatgacagggcggaccttgccaagtatatctgtgaaaatcaagattcgatctccagtaaactgaaggaatgctgtgaaaaacctctgttggaaaaatcccactgcattgccgaagtggaaaatgatgagatgcctgctgacttgccttcattagctgctgattttgttgaaagtaaggatgtttgcaaaaactatgctgaggcaaaggatgtcttcctgggcatgtttttgtatgaatatgcaagaaggcatcctgattactctgtcgtgctgctgctgagacttgccaagacatatgaaaccactctagagaagtgctgtgccgctgcagatcctcatgaatgctatgccaaagtgttcgatgaatttaaacctcttgtggaagagcctcagaatttaatcaaacaaaattgtgagctttttgagcagcttggagagtacaaattccagaatgcgctattagttcgttacaccaagaaagtaccccaagtgtcaactccaactcttgtagaggtctcaagaaacctaggaaaagtgggcagcaaatgttgtaaacatcctgaagcaaaaagaatgccctgtgcagaagactatctatccgtggtcctgaaccagttatgtgtgttgcatgagaaaacgccagtaagtgacagagtcaccaaatgctgcacagaatccttggtgaacaggcgaccatgcttttcagctctggaagtcgatgaaacatacgttcccaaagagtttaatgctgaaacattcaccttccatgcagatatatgcacactttctgagaaggagagacaaatcaagaaacaaactgcacttgttgagctcgtgaaacacaagcccaaggcaacaaaagagcaactgaaagctgttatggatgatttcgcagcttttgtagagaagtgctgcaaggctgacgataaggagacctgctttgccgaggagggtaaaaaacttgttgctgcaagtcaagctgccttaggcttataacatcacatttaaaagcatctcagcctaccatgagaataagagaaagaaaatgaagatcaaaagcttattcatctgtttttctttttcgttggtgtaaagccaacaccctgtctaaaaaacataaatttctttaatcattttgcctcttttctctgtgcttcaattaataaaaaatggaaagaatctaatagagtggtacagcactgttatttttcaaagatgtgttgctatcctgaaaattctgtaggttctgtggaagttccagtgttctctcttattccacttcggtagaggatttctagtttcttgtgggctaattaaataaatcattaatactcttctaagttatggattataaacattcaaaataatattttgacattatgataattctgaataaaagaacaaaaaccatg

SEQ ID NO: 613 - DNA, 8469 bp, Artificial Sequence
  GABRA2
aatttccccccccggccccagctcctgtcatcgttttccccctcctcctcttcctcctcctcctcttcctcctcctccgcccatcaccgccactacgaacgccttcgcctccttctacacctcgcgccgccgccgcggctcctagcgctcctctccggcttccaccagcccatcgctccacgctctcttggctgctgcagtctcggtctctctctctctctctctctctctctctctctctctctctctctctctctctctctctcccaagtttcctatctcgtcaagatcagggcaaaaggaagaaaacaccgaattctgcttgccgtttcagagcggcggtgatgaagacaaaattgaacatctacaacatgcagttcctgctttttgttttcttggtgtgggaccctgccaggttggtgctggctaacatccaagaagatgaggctaaaaataacattaccatctttacgagaattcttgacagacttctggatggttacgataatcggcttagaccaggactgggagacagtattactgaagtcttcactaacatctacgtgaccagttttggccctgtctcagatacagatatggaatatacaattgatgttttctttcgacaaaaatggaaagatgaacgtttaaaatttaaaggtcctatgaatatccttcgactaaacaatttaatggctagcaaaatctggactccagataccttttttcacaatgggaaaaaatcagtagctcataatatgacaatgccaaataagttgcttcgaattcaggatgatgggactctgctgtataccatgaggcttacagttcaagctgaatgcccaatgcacttggaggatttcccaatggatgctcattcatgtcctctgaaatttggcagctatgcatatacaacttcagaggtcacttatatttggacttacaatgcatctgattcagtacaggttgctcctgatggctctaggttaaatcaatatgacctgctgggccaatcaatcggaaaggagacaattaaatccagtacaggtgaatatactgtaatgacagctcatttccacctgaaaagaaaaattgggtattttgtgattcaaacctatctgccttgcatcatgactgtcattctctcccaagtttcattctggcttaacagagaatctgtgcctgcaagaactgtgtttggagtaacaactgtcctaacaatgacaactctaagcatcagtgctcggaattctctccccaaagtggcttatgcaactgccatggactggtttattgctgtttgttatgcatttgtgttctctgccctaattgaatttgcaactgttaattacttcaccaaaagaggatgggcttgggatgggaagagtgtagtaaatgacaagaaaaaagaaaaggcttccgttatgatacagaacaacgcttatgcagtggctgttgccaattatgccccgaatctttcaaaagatccagttctctccaccatctccaagagtgcaaccacgccagaacccaacaagaagccagaaaacaagccagctgaagcaaagaaaactttcaacagtgttagcaaaattgacagaatgtccagaatagtttttccagttttgtttggtacctttaatttagtttactgggctacatatttaaacagagaacctgtattaggggtcagtccttgaattgagacccatgttatctttgggatgtatagcaacattaaatttggtttgttttgctatgtacagtctgactaataactgctaatttgtgatccaacatgtacagtatgtatatagtgacatagcttaccagtagacctttaatggagacatgcatttgctaactcatggaactgcagacagaaagcactccatgcgaaaacagccattgccttttttaaagatttaccctaggacctgatttaaagtgaatttcaagtgacctgattaatttcctattcttccaaatgagatgaaaatggggatcctgtacaaccctttgtggacccttttggtttagctcttaagtaggggtattttctactgttgcttaattatgatggaagataacattgtcattcctagatgaatcctttgaagtaacaaacattgtatctgacatcagctctgttcatgagtgctcagagtccctgctaatgtaattggaagcttggtacacataagaaaaactagagatttgaaatcagctatgaattactctatatagtatctatagccatgtacatattacagcatgacaagctcaaataattatgagtcagcccgaaaggatgttaattatgcctacgatgtaataactattggaatgtcatggtcattacatttttagcttcagagtttatttgaaagtaataattgaaatcctacaatttattttaatcattggaaactaccttaattaaaaaaaaagaaaagaaatgtgtcttaacatttccaggtatgtgttgtattgaaattgatcagctaaattttacgggtgctggagactggaaaaagcatccagtttggttgctgtggagcaacatgcatattggattagaaaattgtgccaaaaactcccactgatgagaattcataggtgccccacactatgacaaacacttatatgattctcctctttcctgtttactgcaaattctgccttaaggcttcttttcaagactcagaagccactaattataaaggaaagggcagttaattggcacatttttctcttgtgaaagcagttctttcagataagaattaatgtaaatctgcttttgtaaattgcaactttaaatttcgctgactcaaatttacaacagctttgtataccagaagaggttttggtaagggttgaacatttttacactgcaactttaaaacatcaccaatagattgtggattatttcacgtgcacaaacatacacacacacacacacacacacacacatacacagctaaattagaaaacacaattttaaattttatataattactagttattaatgggtaaaattcatttttcttttaatatcttaaaatattatttatgccccgaaatatgctaataaaagttaaagattgtgtattatgcctagattcaaagtttttggcaaacttcaaatacttttgattgacatgtacattagcagttattagttgacttttactaaaacatgcacctttacgatggtgtttttgtagaaacataagtagtcaaatagtaacatttattgcagttttgtacagtatttgagtatagtgcataaataggtatgttcataaaatcaataaaaggagtatctatggaaataagcaaaatatcagcaaaaattgctattcctttgcctcatttaatttttaaaatttctttgtttccatgtgattctattatatgctttgcatgcttgtataaaaccaaggtcacaaatgcaacttattaacggaatttgccaagaagacagccttgacattaaaaattccctcacaagaggtaatccataatccttaataaaataaaattgttacatgagccaataaatgtatttctttaattcccttccagtaacactttctttgtcacctagttttaaaatgtgcactttattcatacattgaaatagaagatatcctattttcttatacatttaaatatagcatagctcttctgtatagtttagggatgtgtgcaattgtataaggaagtacacaatgccagaaggcaagcaatgaaattgctctatatggtatgcattattagatactttaagaatatttgtcttgtaaagtccgcattgcccccttaatgtctgactataagttataaatttataaatatgtgtatatgtaaaaacagttgtaaataacagtttctgtatgacaacagaaaaggcttatctatactttgggcaaagagctgctactatattgatggcaccagtattattagcatttatggcagattgaccagaaaacttatcactgttattcttattttaaatttcatgtggtaaaattttatttgagtgcaatgacattctggcagttcagatttttcagtgctagggatcagaattctttgttatttctttaaactttgatgtactttttacatatttcttcttcttttaatgtttaaataaatcaaaaggagcttcttctcttgtggggagactagggatgctccgtggaaattgcttttaaattatagaacaagattcgtaacaattataatcctttccatgaaccaatttaaaaacaaatttaaaaggattttaatttatcacaataaggccaatttttcagaaaatacattttatatatactaacactgatctctttggcccataagattatacctattttatgcagttgtacaatgacataaagagttatggtatgtacaaaatgtagataaatacatgtacatatatagagatataatctcattattttatagctactactctgatttaactaatatttattcaaaaatattttttacctcctgtgccatgccctgtaattggtgttaaaatcactcatgtcacacccactgaatttagttgaaattttaagtgcatctcattcttataatgacttgaaattaaagactatataaaacatgtaaattaatttagtactgggagttctttaatgagctatgatgccactagtgtgctaggataggtggctgtttttctcttttctcctgttcatgttcccatgtgtttgattataaaatggaagaaatataaccatttaatatatattttttaaattttaatgattttattaagtgccaatcttaatgtttagaaatcttttcaggtatctctctattttgaatttatctcaggtttggataagtgatccccttgagccatgtttctaaattttttttcttaaatagttcatagtttatttttaaaaacaacccagaatctattattttactctcattatttggtaagtataatttgcatttatgtggctctttttgaattcctggttgagggacacaaaccctgccatgatataatcatggattccagaagagcaccaaagtacttttctttggcatggccggtcatcattccaatgaaagaagaaaggaagtagctcaagtcaccttctgcattatcatggttctttggcatccattaataatttgtttaatgtattctatgcctgatgccctcagacacatgtctgtgaaacacagacatatttattatttacttggaaatatgaggttatgttaatagatttactaaacagattattattgttattagtctcctggcacactgacattcatctgcatgtttttgaagcaatgaccaaattttttatcatatgaaaacattcagaattttaaggggattactacctgactcattgctaccctatagtgccattcattttccttttaattgaggtcccataggcacctcgtgcttcccttttattaatttaaagtatgcagaagtgtaaaattttaactggggaggggtgcagttatttttgacatctgcatgcttgagaaacatggacactataccaaaaccacttgtaacagtgtggagaagacaagtcatatttttatctactgaattcatgctctaaaaattaaagtaaatatttaacataattatttaatatccataatattttgctgttaaaatttatattaaagatattaatattttccatcagtatttaagagctcagaattactgaaaagaagaaaccacaggaaacaggagactgttgttaattaaaccaagtgaagcatttttccctttttaacttccgagaaagtagataaattatacatatgtagacacacaaatattttaagagtcgttattctatcatagtaagcatcataactaaaatactaaagtagagaaagttcatgtgaaagtcatttgggaaggtaaattattcaatatctacttataaatattatatatcataattttgtttttttgctaaaattcttaattatcaacatatctagaccactgtgtcttccatcttgttaagttgaaatattctatttttgtttgtttatatatgaagaaatacttataaaggtggttatacgtcccacctcaaactactcaatgatgtatttaatacataacattacctaatattgccaatagtaaagaacaatttacaggtttatgtttcagcttacagtaatgttcccaaagatcttttaatagggtcttagctgtgtgtgtcagtgatgtgtgtatgtttgcgagtgtgtatgtgtgtaattcctaggtatgtatggaataatgttttgagaaattcagataaatttatgatatctaaacaatttgttttattaatggatcttatcacaaattcagctcttattaaactagcaattaacttgcacactagaacacatttttcagtaaatccataacaaacttattaattagaattaggtttgagttatgcatatggttaaaaatatcttttctatgttggtgtaaactttttcgaatgtatttctagtttttttttaaaaaaagattaaattcaaaatgatcttgcaattctgcttcatgagatagaatagaaacatctttgaatgccaggtttctcaacggaggcttgtgtaagctcttctaaaagttaaatatctggttatttacaaatacaaagttatgtatattcattactgatttgtttcataccttactttttgaattggaatgattcagagtataattcttacagagagcccatcacatactagtcaacgttctaagttttttatgcatattagttcattcagtcctcacagcagccatcatcactgtgtgattcttgaagctctggaaatctaggatttctatatagtacaccaacataccagtttacatatattataggaaaggtaaacgaaacaaacaaacaaaaaaacaaaaaacaacaaaaaaaccaaaaacctgtgttttttctttgctttaattcaaatttatattcatgccttttggggaatattcattcaataagggagccattacatggttttctacataacaaaacaaacaagtaaaaagcaaacactcaacaataaaactgtactgtacagtaagcaatacccgtttttgtgatgctagctatttactaacttctttggtacaatttagtttctgggaatatattgcagttttcttttttggttcacaagtaatgatcacgtattaaaaatgattaatgttgattaagcaaaagtaagcacttccttcatttccttttttttctaattttgccagttttattagtggttggagagatgtgttttcatttgtcatattgttcgtttcataacatttaatcccattgggcttcaaggattatgtattgatttcatcaaatattttgttgtaagttaccgtttatagaatgacgcctgaattgatcccaagggatgccaccggtgggattgcaattgctgaattagcttactaggtttgaaaatgtcagttttccatgcttctttttagaagactttgccataacatgatgccaaaaggcaaactatgttgcattggctatataaactgtattattggctatacatgaatatttccaacaaagtttatttgtaaaaacaactgatgctaagaaagcaagagttagttgcagaattactttagaaatagtactgatagatttgttcagaatttatttttaacatattcgacatagtcgttgaagcaattgattgtgctttaaactgatcataatgtgtaaaaaggtgtaacgtataattagaaagacataagtaaaactcaattattgagccacaattctcatgaattaaactttaccatccacagttaagtccttattgcttgttaatcttgggtgcctgcactacacttgattttaaaattgttggtcttctataaattttcaagattttcctgagcagatacaaattcaggttttgatgtgcttcaaactaaggaacatcacctttcatgaaatgtttccagtagatgtgatgtgagtgaaaactttaaaaaatgtcatacttattgctacatttgaatagaaaataaaaggaataaagtatttttcctttgctacaaattaataatacgatcacatgcagagagaatgtgaggaaccttcaacactaaactttgatagtcacattatgtgaaatttgaaattttctgggtgacagtatacttattggtaggttttctggttcatgaaaataactcaagaactaatatttgtaattgtgaccttgttgtaattgggaaaggccactagttgatcatatgacctttattgaatatgtcatgcttgctgtttaaaaaattcctaactaatcacatgcaaattaatgctaaacaacttttttgtatttattaaaaatgatttaaatataaaaaaaaaa

SEQ ID NO: 614 - DNA, 1858 bp, Artificial Sequence
  MGP
atcctgtgtaacacagtcaggtccagcagttagggaaaactgcccactcagagtagataatatctggaaggaatgactgtttgggaaaagttccaatgctagttcagtgccaacccttccccaccttctccagctctctcccactggttcctcccctctcaactgctctggttcttataaaaacctcacagccttccactaacatcccgtaggagcctctctccctactgctgctacacaagaccctgagactgacctgcaggacgaaaccatgaagagcctgatccttcttgccatcctggccgccttagcggtagtaactttgtgttatgaatcacatgaaagcatggaatcttatgaacttaatcccttcattaacaggagaaatgcaaataccttcatatcccctcagcagagatggagagctaaagtccaagagaggatccgagaacgctctaagcctgtccacgagctcaatagggaagcctgtgatgactacagactttgcgaacgctacgccatggtttatggatacaatgctgcctataatcgctacttcaggaagcgccgagggaccaaatgagactgagggaagaaaaaaaatctctttttttctggaggctggcacctgattttgtatccccctgtagcagcattactgaaatacataggcttatatacaatgcttctttcctgtatattctcttgtctggctgcacccctttttcccgcccccagattgataagtaatgaaagtgcactgcagtgagggtcaaaggagagtcaacatatgtgattgttccataataaacttctggtgtgatactttcatcttgtaaatctgctttcttttgggaagatattgagatatttaaatcatggcccaccttacccaaaataggagattctgttcatctcatatctagtattaattagaaaaataactacataaaaagaaggaagctaagaaggcactcactcagccataaattctctaaaccctctctaccttggaatccgtgaatggaatctggtatgttttttgcaggattttcctattgtaaattgtggcaaatacagggctcccttcatttgcttttcatctcttatgcatcaaagtcaaaaacatttctgaatcaagataatctagaagagaaaaaaggaggaaaaggaaaagagaaagcagaagggacaaataaaagcaattggcaaaaactgtcaataatagtttatacacttaactatatcaataatcacattatatgtaaatagtctaaacaatccaattattttttacttctacttatgttatatttttacttctacatttgttaaaggttccacgctacatttttactattcttgctttaaataattttaataatttcttttaaagtttagataataagaaaatatcccgggccaggcacagtggccacacctgtaatctcagtagccatgaccataccaatgcactccagcctgtgaaacagagtgagactctgtctctacagaaaaataaaaaagaaaagaaagaaaagatctcatatatttacccatgtaattttcatttcctgttttcttcattcttctttccatctggtgtcacttcctttctgcctgacgacttcctttaacgttttttatagttcaggtctgcaggattctttaagttttgtatgcttgtttttattcttgaaagatattttcactgtatattgaatcccaagttgccacgtttcttttaattattttaaggtattccactgaattctagcttgcacaatttttcgatataaaatttgttgtaattcttacctttgttccactgtgtatactgcatcttttatctctggct

SEQ ID NO: 615 - DNA, 1904 bp, Artificial Sequence
  CXCR4
cttccctctagtgggcggggcagaggagttagccaagatgtgactttgaaaccctcagcgtctcagtgcccttttgttctaaacaaagaattttgtaattggttctaccaaagaaggatataatgaagtcactatgggaaaagatggggaggagagttgtaggattctacattaattctcttgtgcccttagcccactacttcagaatttcctgaagaaagcaagcctgaattggttttttaaattgctttaaaaattttttttaactgggttaatgcttgctgaattggaagtgaatgtccattcctttgcctcttttgcagatatacacttcagataactacaccgaggaaatgggctcaggggactatgactccatgaaggaaccctgtttccgtgaagaaaatgctaatttcaataaaatcttcctgcccaccatctactccatcatcttcttaactggcattgtgggcaatggattggtcatcctggtcatgggttaccagaagaaactgagaagcatgacggacaagtacaggctgcacctgtcagtggccgacctcctctttgtcatcacgcttcccttctgggcagttgatgccgtggcaaactggtactttgggaacttcctatgcaaggcagtccatgtcatctacacagtcaacctctacagcagtgtcctcatcctggccttcatcagtctggaccgctacctggccatcgtccacgccaccaacagtcagaggccaaggaagctgttggctgaaaaggtggtctatgttggcgtctggatccctgccctcctgctgactattcccgacttcatctttgccaacgtcagtgaggcagatgacagatatatctgtgaccgcttctaccccaatgacttgtgggtggttgtgttccagtttcagcacatcatggttggccttatcctgcctggtattgtcatcctgtcctgctattgcattatcatctccaagctgtcacactccaagggccaccagaagcgcaaggccctcaagaccacagtcatcctcatcctggctttcttcgcctgttggctgccttactacattgggatcagcatcgactccttcatcctcctggaaatcatcaagcaagggtgtgagtttgagaacactgtgcacaagtggatttccatcaccgaggccctagctttcttccactgttgtctgaaccccatcctctatgctttccttggagccaaatttaaaacctctgcccagcacgcactcacctctgtgagcagagggtccagcctcaagatcctctccaaaggaaagcgaggtggacattcatctgtttccactgagtctgagtcttcaagttttcactccagctaacacagatgtaaaagacttttttttatacgataaataacttttttttaagttacacatttttcagatataaaagactgaccaatattgtacagtttttattgcttgttggatttttgtcttgtgtttctttagtttttgtgaagtttaattgacttatttatataaattttttttgtttcatattgatgtgtgtctaggcaggacctgtggccaagttcttagttgctgtatgtctcgtggtaggactgtagaaaagggaactgaacattccagagcgtgtagtgaatcacgtaaagctagaaatgatccccagctgtttatgcatagataatctctccattcccgtggaacgtttttcctgttcttaagacgtgattttgctgtagaagatggcacttataaccaaagcccaaagtggtatagaaatgctggtttttcagttttcaggagtgggttgatttcagcacctacagtgtacagtcttgtattaagttgttaataaaagtacatgttaaacttaaaaaaaaaaaaaaaaaa

SEQ ID NO: 616 - DNA, 6872 bp, Artificial Sequence
  RBFOX2
ggcttccttcagccatctgcctgagatatgggagggagctggagaaagaaggagggggagagactgccagagaggaagagaaaagaaaggaagaaacattagaaagaaaaaggaaggaaaacggtataaagagagatcaattacccacccttaaatagctagattggggggggaggggggtggaaaagaaagctgtggaggtgtgccccagcacggctgctttgaaaggtttatcatctatccgtttggtttatggagaaaaagaaaatggtaactcagggtaaccaggagccgacaacaactcctgacgcaatggttcagccttttactaccatcccatttccaccacctccgcagaatggaattcccacagagtatggggtgccacacactcaagactatgccggccagaccggtgagcataacctgacactctacggaagtacgcaagcccacggggagcagagcagcaactcacccagcacacaaaatggatctcttacgacagaaggtggagcacagacagacggccagcagtcacagacacaaagtagtgaaaattcagagagtaaatctaccccgaaacggctgcatgtctctaatattcctttccgcttccgggaccctgacctccggcagatgtttgggcagtttggcaaaatcctagatgtagaaataatctttaatgaacgtggctctaagggattcgggttcgtaactttcgagaatagtgctgatgcagacagggccagggagaaattacacggcaccgtggtagagggccgtaaaatcgaggtgaataatgctacagcacgtgtaatgaccaataagaagatggtcacaccatatgcaaatggttggaaattaagcccagtagttggagctgtatatggtccggagttatatgcagcatccagctttcaagcagatgtgtccctaggcaatgatgcagcagtgcccctatcaggaagagggggtatcaacacttacattcctttaatcagtctccctttagttcctggcttcccttaccctactgcagccaccacggcagccgctttcagaggagcccatttgaggggcagagggcggacagtatatggtgcagtccgagcggtacctccaacagccatccccgcctatccaggtgtggtttaccaggacggattttacggtgctgacctctatggtggatatgcagcctacagatatgcacagcctgctactgcaaccgcagccaccgctgctgcagccgctgcagccgcttacagtgacggttatggcagggtgtacacagccgacccctaccatgcccttgcccctgccgctagctatggagttggcgctgtggcgagtttataccgaggtggctacagccgatttgccccctactgaagtgacgtgagacccctgcaaatgggacagccccccagttcatgaggcctggctattgcaatatttactagtagaggaactctatagcaagatgaagaggaaaaacaaacaaacaaacaaaaaaaaacacaaaaaaagaaagaatacttttttatacctcactatgttctttgaatatgtatttttcctttaaatttctgcctttaattcttttgttccaaagattgtgcatttttttctttttttttttaaactgtggtaaaaaaaaaaaaaataatgcatttccatgtctgtatgtccgtgcttagcttattctatcaatcacggaagaggcagtcaaggaggaaggagagacattaggagccgataaatgcatctgatcagaaatcagcagacagaattaccaaagtgtatctggtgctgaatgactgggggacaagcagaagtggaagagatctttctgcaacaggatattcttctagtcttctgagtttctggtctttgacaggcaattctggttggctgtggctggaatccacatgctgatagataggaatttgtgcttacaaagcaggagaattaaaaagacgctttcctctcctcttccctcctgtcttctccgttctttttacaatcatcttacacgcacagcctgagacagctggcatagtttttggaattatagtattgatatttccaaacgtgctctcagacagtggataataaacacctcattaggaaaccgatctcagaatgaactctggagtatgaaaaagatcatttctttttgttcctgtaacctagcattccttctaggcttcttctcctttaattgaaccacagcttagctcatgtattcttttattaacaccctgctctcatgtccataagattcaggaatttaggacccagggacagaaaagtgaataagccagtgaccagatttcccccagatgtcttgaggattagaagtacaaattgttgacagccattaaagagggtgaggaagggaaaaggaatattagaagatctggtatttcttacttttttcttgcctcagaaagtacaaagtttaaaaaatagaataaagaatctgctggggaaagatagagtaccaggtcctaggtcagtagtccctggaagttttggtgatgaggacatggaagggcaggcagaggcactttgtacttgctccaaagccataggaattttcatcttccagagcctttatgagtcacttctctatccacagtcttgagcctgtggctatcccgctgagcttctcactgtcctccaaaaacaccccgctgagcacccggaccactttgtacacattaacactacaggacataaaatgcagaggccctgagattgctgccctcccatattggaaggagggtctgcgatggcaagggtcttctatatcaccagaaagagtcgcgcagtgagtcactgccgttgccatctggctgtaattttctatgttatcaaggtaggagggagtgtttctcttctagctgttagatagaactgataaaagcaagtgtcctacagcatttcccaaatgaaggcattaggaaatagaaaagcacggtctttttggctccctggtctagtcacattggtactagggtgacctttcacccaagggacagctgctaaagggagtaattcagagacatggagcttctggttatgggtttgttttgggtttgtttttaactcctgcctccacacatgttcttgactgataactgactcatgtccctgaattaaaatgactgacctatgacagcatcaagcattctttgtaagcagagtgatatatctgagagggcgttgacctgttgtgtagaatacatatcctttcccccttcagaatcctgtctcgcctcgtaactgggagagaggctgtgcctgaaactaggggcgatgtcaaggaagctagaggcctcgatgcaattattactgactctggggaggaagacagagaataaggggacaccaactgcccagtccactggccatttttaagggtccccccaccccaagccaaagtttggtttgttgctgttaagacaatttttgttgtatgtatataaatattttagttagaggagcggggaatgggatgcgggctttcacagttctagggaatgggggcagggaggattttgcttttgcttttgctttgagggagaactttagctgactaaaaaaacagaagtttggggtcatgatcacaaaggggccattcccaaaagatggcaagccacgtattcagtggagactaggccaaattctaaatggttttatccatagcaggggagaataggagaatgagtttaagagtttttctcttcttttttcctagaaagaggtaaggataatgggaaaggtagagaaggcggctcccacagaccttttaagagaggcagaatcttgagcttgaggcaccttgagtgcatctcagttcagctggttctggctgaggcctccaaaggcaagctctgtgctttccagtggtttctgctgcatttccagggatggtgtttaacaccgcttcctccagctcccttttctaagaaagaataaatggagttctgctttttatgaaagggtctttggttttcagtgtcaacactgagaattggggctcttgcaagcatctggatttcacagtatcaacctccccgtcaccttttgaactttgagactccgtacggtcaacttcaccagaggcaggttgctcgaagcagcactgcttgtctgttcctgactctggttctcactgtattaaaaaagagagtcagaggagtctggcatttcgtgagtttgttagaggatgctggctgataattccagaaaacttactgatgctaaatcacagtacatgcatgattctttttcagctttactatagttcatgacctggactttctgtactcttggaagctgggctccttaaaggaggcctctagtgaacacctttatctccatgtccctcttagagcccagagagctgcccataggcattttccagaattcctcatgtcacctagttcaatttccattaactcagatcagccattgtgattcaccatttgtcaggctctcaggtttaacaaaacctactatcaccatcatccttcaacagccacagtctgaattgagccaacatttttttttctttgagaaagaagtggactggggcacaacttttagtctgaggggagctagtggaaatctagacaatagaagtcatcgatagcagcttttcctcaaatgtgtgactcctcaggggctaaactgctcttagcttagaattatgctttactagagatctagcagataagtgggttaatcactaccatcctgtaactagttatatagcttccagacatgagggagacatcaaacagggatggaagcaaccccaaggatatgcaagaagggcatgatgaacccccttccctctggcaggagaacaaggccaaccaagggacagactggaaagcacttagatgtttaaggaggagaaaggggaagctttgaccagtccttgccttttgccaagttcagccagttctccgctgcttgcaacctctagcgcagtaacatttgcagaattgcagattttcccccagatactaggaggaaagggactttggggggtggggaaggggtcgtggtgttttaaaagcataagttacctgtttgcactgttttaagataggaaaaaaaaatagtgggcaaggtgaacatcagacgtaaatttgtgtgtttttattttgtcatgctcttgaaaatgtttgaccatttgtagtatacacagtgaaacttgattctctgttgcataaaacactatatttttttggaaatgttactgtccaaaagcctcttccctccctttccttttcctatgtacttccttcatacttgctttactgatcagccaggcaatagccatccaagagctagagcatgaaacagggccctttccaagtaggctctgggtgtcctaagccagcgtgtgccctctggtttagtgagtgtaatagagtccctggcacctttctttgcaaatgaggctaacagaccagactgcagcaagttatcagattcctcaatcagatgcactaggagtgaggagcccagggatggagggggttcctgaagtattgcagttggctgtagtagctgagttcttttccatgttaccgaaactgtagccagttacagtttactcaggaaaacggtagatcaattcagccatggtagtgctggttggcagggattggtaacggagagaactgctcatcagccaaaactcaagccttgccttttaggaggccaccagcagagggacttggtcctccttgtctggtacttgtgtacatgccggtgacctgaggactccactcacactggcgagcaaaaagggagcagtgattctcttttctctccccaccccctgccctttgttaccaacaccagtttcccagggggtacatgagtttctgaatttttaaaaaatgtttttggtttggtttttctggggactgataagtgctttaagcaatgtccataccccgtcaagactcccagcttagtcattttcttgtatttttctgttcacagtatttgtgtgtgtgcttgttttggcagctcattttggctgtattatatattgagtgatgaattgatcctcttttttccctaagggatatgaattgtttttcttgtgttatattctgcttgtgaatagctggagcaaacctggggctgacacgcgtaagctagggctgcaaagcgagaagagagccggtggagtgtacttgtccctgacaggctgacctacctgagtctctgagcttttcagtccaaatctttgcaaggctcaaaatgccacagaacctctcctcttctccccactccccatggcagggaccggaccatccctacatgcaacatgctgttcctccagcccctcccattgccatggcaaaacaggtacctttggggcatgggggcattacatgggatgcttgtgtaatcgaccacctagccttctctctcccctcccgtcctcccccagaatcacttcctaggacacccgagctgcttgcccagggtcctgtttccctgctaactccagagaagcatcccagggctttgtgacagtctctaattcccttcccttctcgttaagaatcatattgtatagtagctttcagaccatacagtattcattgggttactcctattattatcaagtagctggaattgtgaaggtcggagtagttagatctttagcttttattccttatttttttgtattactctccatgtgtataaattattgatcatgttgctggcttttataaactctaagcgaaggaggagcactgcctcagcctttgcacatggtaatgaagcactgtttttaaataaaagagagaaacaccattaaaaaa

SEQ ID NO: 617 - DNA, 3583 bp, Artificial Sequence
  IGSF11
gcggttgccctggagaccaagcggggcgagtgggcggcgcggcgaggagccgagctgcggctggagtagcggggcgtgagttggggggagtggctccccggactgcgcgaggggtcggctagtcctggggcagggctgggtggcacggctggcgagcccggaacgcctctggtcacagctcagcgtccgcggagccgggcggcgctgcagctgcacttggctcgtctgtgggtctgacagtcccagctctgcgcggggaacagcggcccggcgctgggtgtgggaggaccaggctgccccaagagcgcggagactcacgcccgctcctctcctgttgcgaccgggagccgggtaggaggcaggcgcgctccctgcggccccgggatgacttctcagcgttcccctctggcgcctttgctgctcctctctctgcacggtgttgcagcatccctggaagtgtcagagagccctgggagtatccaggtggcccggggtcagccagcagtcctgccctgcactttcactaccagcgctgccctcattaacctcaatgtcatttggatggtcactcctctctccaatgccaaccaacctgaacaggtcatcctgtatcagggtggacagatgtttgatggtgccccccggttccacggtagggtaggatttacaggcaccatgccagctaccaatgtctctatcttcattaataacactcagttatcagacactggcacctaccagtgcctggtcaacaaccttccagacatagggggcaggaacattggggtcaccggtctcacagtgttagttcccccttctgccccacactgccaaatccaaggatcccaggatattggcagcgatgtcatcctgctctgtagctcagaggaaggcattcctcgaccaacttacctttgggagaagttagacaataccctcaaactacctccaacagctactcaggaccaggtccagggaacagtcaccatccggaacatcagtgccctgtcttcaggtttgtaccagtgcgtggcttctaatgctattggaaccagcacctgtcttctggatctccaggttatttcaccccagcccaggaacattggactaatagctggagccattggcactggtgcagttattatcattttttgcattgcactaattttaggggcattcttttactggagaagcaaaaataaagaggaggaagaagaagaaattcctaatgaaataagagaggatgatcttccacccaagtgttcttctgccaaagcatttcacactgagatttcctcctcggacaacaacacactaacctcttccaatgcctacaacagtcgatactggagcaacaatccaaaagttcatagaaacacagagtcagtcagccacttcagtgacttgggccaatctttctctttccactcaggcaatgccaacataccatccatttatgctaatgggacccatctggtcccgggtcaacataagactctggtagtgacagccaacagagggtcatcaccacaggtgatgtccaggagcaatggctcagtcagtaggaagcctcggcctccacacactcattcctacaccatcagccacgcaacactggaacgaattggtgcagtacctgtcatggtaccagcccagagtcgggccgggtccttggtataggacatgaggaaatgttgtgttcagaaatgaataaatggaatgccctcatacaagggggagggtggggtggggagtgctgggaaagaaacacttccttataattatattagtaaaatgcacaaagaagaaggcagtgctgttacttggccactaagatgtgtaaaatggactgaaatgctccatcatgaagacttgcttccccaccaaagatgtcctgggattctgctggatctcaaagatgtgccaagccaaggaaaaagatacaagagcagaatagtacttaaaatccaaactgccgcccagatgggcttgttcttcatgcctaacttaataatttttaagagattaaagtgccagatggagtttaaatattgaaattattttaaaaggtaggtgtctttaagaaaataacaagcaaccctgtgatatgttccgtctctcccaattccctcgttatatagagggcttaatggtataaatggttaatattggtcccaacagggctgactcttctatcatataatcaaaactttttacatgagcaaaattcagtaagaaatgggggaagacaaaggaaacgtctttgagaagccccttcatatttatttatttatctcttcctgaaccatgaatttcatatgtggaatattgctatattgacagattcttgcctgtctgtgttattctaggatctgttacaggtccatggcaattactgtttattttttcctggaaaaatatttttttataaaaggcttttttttttttttaaatacatgagaggcattgggctaagaaagaaaagactgttgtataataccttgttcaatggttgtatttagtgagctcatagaggtccatcatatcatgaccgagctaggttgtgtgggcaggaaggtagggctaaggggttgtagccttgctgggcagcctctcagagcaaggttgttcagatctcccttgctattacagtaggttactattaatgagggcagcacctgatgccttttgtactgaggtatgtaactttctccttatttgacaagtagaagttaacttacttgtcagggagggcagacgtttttttgttctgtttcgtttttcaaaataatgctttttgcaaaagaggtaagactgagactaaaggtgttatcttctggtgtgctcctggaagtgtctaccctacatttgtgtcagctcagggttgcagtgttgcccagatgcattttacatcactgtaaagagattacttttgtggttactacctggcttggctggccttgcggttcaccagattaatttacaaactcccccactttattttgtgctatgtagatctggccatacttgcattagtgactgtcttgccttaaccacacttaagcaacccacaaatttcttctcagatttgtttcctagattacttatgatactcatcccatgtctcaataagagtgtcttttctttctggatgtgttctcttactccctcttaccaccatactttttgctctcttctcctgcaagcgtagtcttcacagggagtggcttcctgacatttttttcagttatgtgaatgaatggaaaccaacagctgctgcaaacactgtttttccaagaaggctacactcagaacctaaccattgccaaccatttcagtattgataaaaagctgaatttactttagcattacttatttttttttccatttgatggttcttactttgtaaaaatttaaataaatgaatgtctatactttttataaagaaaagtgaaaataccatgacactgaaaagatgatgctatcagatgctgtttagaaagcatttatcttgcatttctttattctttctaattatctaaaattcaataaaattttattcatataaaaaaaaaaaaaaaaa

SEQ ID NO: 618 - DNA, 1608 bp, Artificial Sequence
  IGFBP1
atcattaacctcctggtgcaagtggcgcggcctgtgccctttataaggtgcgcgctgtgtccagcgagcatcggccaccgccatcccatccagcgagcatctgccgccgcgccgccgccaccctcccagagagcactggccaccgctccaccatcacttgcccagagtttgggccaccgcccgccgccaccagcccagagagcatcggcccctgtctgctgctcgcgcctggagatgtcagaggtccccgttgctcgcgtctggctggtactgctcctgctgactgtccaggtcggcgtgacagccggcgctccgtggcagtgcgcgccctgctccgccgagaagctcgcgctctgcccgccggtgtccgcctcgtgctcggaggtcacccggtccgccggctgcggctgttgcccgatgtgcgccctgcctctgggcgccgcgtgcggcgtggcgactgcacgctgcgcccggggactcagttgccgcgcgctgccgggggagcagcaacctctgcacgccctcacccgcggccaaggcgcctgcgtgcaggagtctgacgcctccgctccccatgctgcagaggcagggagccctgaaagcccagagagcacggagataactgaggaggagctcctggataatttccatctgatggccccttctgaagaggatcattccatcctttgggacgccatcagtacctatgatggctcgaaggctctccatgtcaccaacatcaaaaaatggaaggagccctgccgaatagaactctacagagtcgtagagagtttagccaaggcacaggagacatcaggagaagaaatttccaaattttacctgccaaactgcaacaagaatggattttatcacagcagacagtgtgagacatccatggatggagaggcgggactctgctggtgcgtctacccttggaatgggaagaggatccctgggtctccagagatcaggggagaccccaactgccagatatattttaatgtacaaaactgaaaccagatgaaataatgttctgtcacgtgaaatatttaagtatatagtatatttatactctagaacatgcacatttatatatatatgtatatgtatatatatatagtaactactttttatactccatacataacttgatatagaaagctgtttatttattcactgtaagtttattttttctacacagtaaaaacttgtactatgttaataacttgtcctatgtcaatttgtatatcatgaaacacttctcatcatattgtatgtaagtaattgcatttctgctcttccaaagctcctgcgtctgtttttaaagagcatggaaaaatactgcctagaaaatgcaaaatgaaataagagagagtagtttttcagctagtttgaaggaggacggttaacttgtatattccaccattcacatttgatgtacatgtgtagggaaagttaaaagtgttgattacataatcaaagctacctgtggtgatgttgccacctgttaaaatgtacactggatatgttgttaaacacgtgtctataatggaaacatttacaataaatattctgcatggaaatactgttaaaaaaaaaaaaaaaaaa

SEQ ID NO: 619 - DNA, 6092 bp, Artificial Sequence
  KCNJ5
agtcgcgttactacccagagattcatttgtaccagggacggagggagagaggagagggaggaggggacacacacacacacacacacacacacacacacacacacacacacagagagagagagagagagagagagagagagagagattgttccagctgctctcgctagagaaagggagtgacccaaggggccgcgagtgaagggacaggatggcttaggtacctctgcccacaggaccccacaacagggagaggttccagctacagctcctccgtggggtcatggcaggggctggggagtcccctcaaaagccctgagcccccctgcaccgccgctaagggacaccccagaagttagcatcagtgggactcggaagctccgatctcaacaacatcccagctatggctggcgattctaggaatgccatgaaccaggacatggagattggagtcactccctgggaccccaagaagattccaaaacaggcccgcgattatgtccccattgccacagaccgtacgcgcctgctggccgagggcaagaagccacgccagcgctacatggagaagagtggcaagtgcaacgtgcaccacggcaacgtccaggagacctaccggtacctgagtgacctcttcaccaccctggtggacctcaagtggcgcttcaacttgctcgtcttcaccatggtttacactgtcacctggctgttcttcggcttcatttggtggctcattgcttatatccggggtgacctggaccatgttggcgaccaagagtggattccttgtgttgaaaacctcagtggcttcgtgtccgctttcctgttctccattgagaccgaaacaaccattgggtatggcttccgagtcatcacagagaagtgtccagaggggattatactcctcttggtccaggccatcctgggctccatcgtcaatgccttcatggtggggtgcatgtttgtcaagatcagccagcccaagaagagagcggagaccctcatgttttccaacaacgcagtcatctccatgcgggacgagaagctgtgcctcatgttccgggtgggcgacctccgcaactcccacatcgtggaggcctccatccgggccaagctcatcaagtcccggcagaccaaagagggggagttcatccccctgaaccagacagacatcaacgtgggctttgacacgggcgacgaccgcctcttccttgtgtctcctctgatcatctcccatgagatcaaccagaagagccctttctgggagatgtctcaggctcagctgcatcaggaagagtttgaagttgtggtcattctagaagggatggtggaagccacaggcatgacctgccaagcccggagctcctacatggatacagaggtgctctggggccaccgattcacaccagtcctcaccttggaaaagggcttctatgaggtggactacaacaccttccatgatacctatgagaccaacacacccagctgctgtgccaaggagctggcagaaatgaagagggaaggccggctcctccagtacctccccagccccccactgctggggggctgtgctgaggcagggctggatgcagaggctgagcagaatgaagaagatgagcccaaggggctgggtgggtccagggaggccaggggctcggtgtgaggggtgcagcctccctaagacctcctgtcactggcttcagtgaacacagacactgcagagcctgggagcaggggaggggaatagttgagtgtgctgtttgggggctcaggagccatcaaggctgtggggaggaaccataaacccagccctcacagctcccagcacagggcctccctgagccagtggcatcctgcctgggccccccatggcagtgctgcctcttgtaggtgctggctaagggccaggccaggatgagtttccccatggtgaatgttaccggatggcatctgttctctccatgccctgggtcacttccttttttgggtctcacagacccctccaggggctgacacctagagagaaccatcaccttgtccctcattccttccaccctgaggcttgctgtggactcagagaggagacttacctgatgagagctcaaacctctagtctgggatgagctcacagagccctcatgagttaagatccatccatatcacataggcaattccttttaaatcagataccaacgacccattactgagaggtacagagcgtacagcccttggtgttctctgctgttatctgccaaatgtgtgtgtttttcctctgctgtgttctgtgtgtccagtgtagcctattggagaatcggtctcattagagtgactcttagaaggtggcctgggactagacagcccctctgagcacatgcatagtggcatcagcagcttcctggcctactcccaatcacactgtgccctgcacctcccaccaagggggaaccccagcagctggggcttttcgagtgctttttggcccaagaatctcagagtgcttctaatcatcacagtagtttttgtgttttgttttgttttgttttgttttgttttgttttgttttgtttttttcacaatctcagccagcctgcggtgtgacctggggagaaagttgagtgtcaggggacatgatgagccagttggccctgaaacaggaatggggcaaagagaaaggagagccaggagcatttaaaaatcagcatctgggccaggcaagatggctcacgcctgtgatcccagcattttgggaggccgaggcgggtggatcatgaggtcaggagatcgagaccatcctggctaacacggtgaaaccccgtctctactgaaaatacaaaaaattagccaggcatggtggcaggtgcctgtagtcccagctactcgggaagctgaggcagaagaatggcatgaacctgggaggtggaggttgcagtgagccaagatcatgccactgcactccagcctgggcgacagagcgagactccatctcaaaaaaaaaaaaaacatcagcatctgccccagttgtggccaagacactctgacctcagggctcagcaccttcaccatcaagttcagcctgagccaagctcccagcccactgctgaaaagcccctgggcctccctccacaggcagagttacaaccgggagggctgggcagggagggcagggagattgcctggggaaggcaaagggaatggctgcccctcccaggctggaaacaagagggcaagcggggtcagcaggagaattcgggggcagggtgagtgttaagaaaaaaagagtagagaagagcctgaaaatcagcaacttccagggcttttctgatctggaggcccaagagcaagggtggaggggggcagattgtcaggtcccgaaatgtgtgttgacacacacgggcttcgggttagctggcctgacatggagatagagtgccaatgttcccaggccacagaattatggaggcctcacccacagtattcacagctctcaactggcctttgagaatggaagccttttcctgccctggatatggcgcttcttcctgggagaggagcagagccacagagaggtaggaagttgaggcagagcaaagggaaggcttcagagcttaggcccggttcatctcagaagtgttttctaggcctggggctgaaaggaagaggggtggggcagcctgggacgggaactgcctctgtgggctccccactcccagggaggggctccataagctttgctcctgggctggatcttgagaggtgggcagggtcttcccaccagtggcagggtgtgcagttgtggtcccaagccttggagggaatggggaatgggctggcacccggctcagggaaagcagaagcagacagtgccccagcaggggagctgcatgcccccaggagtctcagaaaggcagcccatcactaaggctggatgcctttcagcagagctacagctggagccctccggctgaggccagcactcgcctgggactccctggaccccagggttactaacagcaaaaccattccacacccccttgccagatctaagcctgtcttaggaccgtcagtgcccccaggttagagctcatgggggtcaactaagcgagggagggaaggcgaaggcaaagctggccttgcacctggacagcggcctggctcctccccacacctgccttcatttatgactctgaaacatcccccacctgaccaagggagccactctccagttctctcactccaccagggccctccgtgagccaggaccaggtcacatctctcagccaagtctagaagctctggctagaggagaggaagcgtgcagagggtcctctgccaaagctccctgcctggcccgagcccgggcatgctgggattagtgcaacaccgccccagtgtgcctcctctgccttctatcatgccagtttaaaagcaagaagactcccccttcacatcctgaggaaatccccttcctggtgaccaactgatgcaatgaaagtttgaaaagttcttcattttctagaagttcttgaataaacatggacttactaaatgcagagtctgatgatggacagagtttcaaggggtcactttcaaaacatttaattaatttatttatgtagagacagggtctcgctctgtcgcccaggctggagtgcagtggtacaacctcagctcactgcaacctctgccacctcccaggttcaagcgattctcatgcttcagcctcctgagtagctgggattacaggcatgagccaccacgcccagccattttcaaaacactgctcctgcatacaaaccactcagaggccactgcccttggttctgtgatggctctgagcccatgccatcacatctgatggaccccagagagctgagccgtggtttaagatggggtcatgcgctggtcattcccacagtcttgagtatctccaaaatcccaaagtgatatttcactttcggaccctgaaagtttggagagctggtttcttgccttaatttaagctctctgagaatgtcccctgtagggagaagcctccaggaactcagaatagaactcgttcccactcattttccttgctccaccaatctgacgcctgacagatgtcaccactgcctgaaggatcctgtccccaggccagggcagaatgggcattgcctttgactctccccttcagactcccctcccaccggcctcctgtgtagtcagagaacccactgcccatcgcctcctgctgctgctttgaggttgaggtcctggcttgagcagttaccttgctggagaagaggagcccctgccatctggggagcactgtccctgctcgtgatctgtaacagtggggcgctttttcacaccccttatctcacggcttgcttccagcccccatcaatcctgtgcctcatgtgaggtgagccccagagaaacttaaattgcttgtactgaagttgccaaaaaccaaaagttgcccgttgtcatttttaagactgtgccctgaacacacctctgcccatgcgccatggagcatgtgttaggtgcctgccgtgggtcaggcacttgattctcaaaacactgccgagaagctcttaccaacgtgacagttgaggctgagagaggttcatgagcttgctcaaggccacgggtagtaataagaggcatggccttggtgccaagtgcctcccaaacaaacagccggggccgtggtcctgcctaaactctcacatccacggcaccacgctgggcccaggcaacagagataaggagagccctggctcttgggatggggtcgcgccgattcacatgctgtgccacggagccccggcttccatccatgatgtgcccctgtggcgggataattgggaaacaacctttttctgattcccagagaactaatgagctgcaaaaagagattagacagggaagaattgctttcggggagaagccacttactcggctcgccttggtttttgctaacaacgtctccttaaactgctgtcaaatctttttctccctgtgtaggattcatcaatcttcgtatgcaaaagaacaccactgcactgcactgctaaaaattcacacaataaaatggactttaacttgca

SEQ ID NO: 620 - DNA, 4134 bp, Artificial Sequence
  PAH
cagctgggggtaaggggggcggattattcatataattgttataccagacggtcgcaggcttagtccaattgcagagaactcgcttcccaggcttctgagagtcccggaagtgcctaaacctgtctaatcgacggggcttgggtggcccgtcgctccctggcttcttccctttacccagggcgggcagcgaagtggtgcctcctgcgtcccccacaccctccctcagcccctcccctccggcccgtcctgggcaggtgacctggagcatccggcaggctgccctggcctcctgcgtcaggacaacgcccacgaggggcgttactgtgcggagatgcaccacgcaagagacaccctttgtaactctcttctcctccctagtgcgaggttaaaaccttcagccccacgtgctgtttgcaaacctgcctgtacctgaggccctaaaaagccagagacctcactcccggggagccagcatgtccactgcggtcctggaaaacccaggcttgggcaggaaactctctgactttggacaggaaacaagctatattgaagacaactgcaatcaaaatggtgccatatcactgatcttctcactcaaagaagaagttggtgcattggccaaagtattgcgcttatttgaggagaatgatgtaaacctgacccacattgaatctagaccttctcgtttaaagaaagatgagtatgaatttttcacccatttggataaacgtagcctgcctgctctgacaaacatcatcaagatcttgaggcatgacattggtgccactgtccatgagctttcacgagataagaagaaagacacagtgccctggttcccaagaaccattcaagagctggacagatttgccaatcagattctcagctatggagcggaactggatgctgaccaccctggttttaaagatcctgtgtaccgtgcaagacggaagcagtttgctgacattgcctacaactaccgccatgggcagcccatccctcgagtggaatacatggaggaagaaaagaaaacatggggcacagtgttcaagactctgaagtccttgtataaaacccatgcttgctatgagtacaatcacatttttccacttcttgaaaagtactgtggcttccatgaagataacattccccagctggaagacgtttctcagttcctgcagacttgcactggtttccgcctccgacctgtggctggcctgctttcctctcgggatttcttgggtggcctggccttccgagtcttccactgcacacagtacatcagacatggatccaagcccatgtatacccccgaacctgacatctgccatgagctgttgggacatgtgcccttgttttcagatcgcagctttgcccagttttcccaggaaattggccttgcctctctgggtgcacctgatgaatacattgaaaagctcgccacaatttactggtttactgtggagtttgggctctgcaaacaaggagactccataaaggcatatggtgctgggctcctgtcatcctttggtgaattacagtactgcttatcagagaagccaaagcttctccccctggagctggagaagacagccatccaaaattacactgtcacggagttccagcccctctattacgtggcagagagttttaatgatgccaaggagaaagtaaggaactttgctgccacaatacctcggcccttctcagttcgctacgacccatacacccaaaggattgaggtcttggacaatacccagcagcttaagattttggctgattccattaacagtgaaattggaatcctttgcagtgccctccagaaaataaagtaaagccatggacagaatgtggtctgtcagctgtgaatctgttgatggagatccaactatttctttcatcagaaaaagtccgaaaagcaaaccttaatttgaaataacagccttaaatcctttacaagatggagaaacaacaaataagtcaaaataatctgaaatgacaggatatgagtacatactcaagagcataatggtaaatcttttggggtcatctttgatttagagatgataatcccatactctcaattgagttaaatcagtaatctgtcgcatttcatcaagattaattaaaatttgggacctgcttcattcaagcttcatatatgctttgcagagaactcataaaggagcatataaggctaaatgtaaaacacaagactgtcattagaattgaattattgggcttaatataaatcgtaacctatgaagtttattttctattttagttaactatgattccaattactactttgttattgtacctaagtaaattttctttaagtcagaagcccattaaaatagttacaagcattgaacttctttagtattatattaatataaaaacatttttgtatgttttattgtaatcataaatactgctgtataaggtaataaaactctgcacctaatccccataacttccagtatcattttccaattaattatcaagtctgttttgggaaacactttgaggacatttatgatgcagcagatgttgactaaaggcttggttggtagatattcaggaaatgttcactgaataaataagtaaatacattattgaaaagcaaatctgtataaatgtgaaatttttatttgtattagtaataaaacattagtagtttaaacaatttcactgtttcagttatttcctggaatgaaatattcctctcactgccttagaaatacattagctagatagttttgtaacatgagaaaatggccagaggctcatatctccaaccctttgcaggggctccttgtgacactcaaagtcatgcctggacagtcaacggactttgacttttgttgattgtgtgtttgccatgaaaacatgaatatctgagaagcagtggggagaaaaaaaacaatatctttgtagctatgatttgaaattctcatactactttacattttattttggaaatagttaagtcttaaagaatttgcatagtgtttctttgagtttagttctcagaacagctgtagtatcatcaacagcaaattctgggtaccttcccagctccacccaatttgaatctctgaagataaggcccagagacctgtatttttaagtaccccatttttttaattattcatagccaaattctatcaggtacattcagtttgagaaaacctgatttgtggtggtcagtctgccactgccaatgatgtcaatgtggataagctgtttcccttctttagacctcagtgtcactctaacaatgagggagttaaactttataaaccaaggtccattgcagccttgaaatatgattcaagtgttcatatgtgtctttatatagctatgcctgatccactgatggggtgttacaatacctgcttatatatgccagctgggaggaaagaggaatttactgaatgtgtctgaagtttcattgttttgaagttggaattttatgcctgtatctatgtttatgcctttgtaaaacccactgattttaaaagtgaaaaaggacttttttctctgcttttactctaaacaccaaacaatccctgcaaagggattattctgatgtttcttcatttcacatgaaaagttaattattgactctggaacttaaatattagataatatttttgacaatattgaagagtgagttttagtccagtaaagatgttttaatgagcttgaaggtaaagtttcggttaagttatgattttcacaggaagttacatactgaatgaaagataatatttgtatttttggtaatgtgctactcagttcttagctcttttttatccagatataaaagcccagtctatagctatgggatttaataaatttccaatatgtaagtgtttttatttgtttaatttctagtaaatgagcaatattttagaaacagtatcagtctttactgacagatgatcttgctgagtacaatcaaaataaatacataaaaaattctaagcatgtggcattgatgtttaataagtttctgaaagtaggaatctgaattttaactgtaggtttctaagttatataatttagttgtgtttcaaaaaatccaccaataaaatgtcagctttataaaaacagaaaaaaaaaaaaaaa

SEQ ID NO: 621 - DNA, 567 bp, Artificial Sequence
  APOC3
aaccctcctgcctgtctgctcagttcatccctagaggcagctgctccaggaacagaggtgccatgcagccccgggtactccttgttgttgccctcctggcgctcctggcctctgcccgagcttcagaggccgaggatgcctcccttctcagcttcatgcagggttacatgaagcacgccaccaagaccgccaaggatgcactgagcagcgtgcaggagtcccaggtggcccagcaggccaggggctgggtgaccgatggcttcagttccctgaaagactactggagcaccgttaaggacaagttctctgagttctgggatttggaccctgaggtcagaccaacttcagccgtggctgcctgagacctcaataccccaagtccacctgcctatccatcctgcgagctccttgggtcctgcaatctccagggctgcccctgtaggttgcttaaaagggacagtattctcagtgctctcctaccccacctcatgcctggcccccctccaggcatgctggcctcccaataaagctggacaagaagctgctatgagtaaaaaaaaaaaaaaa

SEQ ID NO: 622 - DNA, 2981 bp, Artificial Sequence
  WT1
aggcagctggggtaaggagttcaaggcagcgcccacacccgggggctctccgcaacccgaccgcctgtccgctcccccacttcccgccctccctcccacctactcattcacccacccacccacccagagccgggacggcagcccaggcgcccgggccccgccgtctcctcgccgcgatcctggacttcctcttgctgcaggacccggcttccacgtgtgtcccggagccggcgtctcagcacacgctccgctccgggcctgggtgcctacagcagccagagcagcagggagtccgggacccgggcggcatctgggccaagttaggcgccgccgaggccagcgctgaacgtctccagggccggaggagccgcggggcgtccgggtctgagccgcagcaaatgggctccgacgtgcgggacctgaacgcgctgctgcccgccgtcccctccctgggtggcggcggcggctgtgccctgcctgtgagcggcgcggcgcagtgggcgccggtgctggactttgcgcccccgggcgcttcggcttacgggtcgttgggcggccccgcgccgccaccggctccgccgccacccccgccgccgccgcctcactccttcatcaaacaggagccgagctggggcggcgcggagccgcacgaggagcagtgcctgagcgccttcactgtccacttttccggccagttcactggcacagccggagcctgtcgctacgggcccttcggtcctcctccgcccagccaggcgtcatccggccaggccaggatgtttcctaacgcgccctacctgcccagctgcctcgagagccagcccgctattcgcaatcagggttacagcacggtcaccttcgacgggacgcccagctacggtcacacgccctcgcaccatgcggcgcagttccccaaccactcattcaagcatgaggatcccatgggccagcagggctcgctgggtgagcagcagtactcggtgccgcccccggtctatggctgccacacccccaccgacagctgcaccggcagccaggctttgctgctgaggacgccctacagcagtgacaatttataccaaatgacatcccagcttgaatgcatgacctggaatcagatgaacttaggagccaccttaaagggccacagcacagggtacgagagcgataaccacacaacgcccatcctctgcggagcccaatacagaatacacacgcacggtgtcttcagaggcattcaggatgtgcgacgtgtgcctggagtagccccgactcttgtacggtcggcatctgagaccagtgagaaacgccccttcatgtgtgcttacccaggctgcaataagagatattttaagctgtcccacttacagatgcacagcaggaagcacactggtgagaaaccataccagtgtgacttcaaggactgtgaacgaaggttttctcgttcagaccagctcaaaagacaccaaaggagacatacaggtgtgaaaccattccagtgtaaaacttgtcagcgaaagttctcccggtccgaccacctgaagacccacaccaggactcatacaggtgaaaagcccttcagctgtcggtggccaagttgtcagaaaaagtttgcccggtcagatgaattagtccgccatcacaacatgcatcagagaaacatgaccaaactccagctggcgctttgaggggtctccctcggggaccgttcagtgtcccaggcagcacagtgtgtgaactgctttcaagtctgactctccactcctcctcactaaaaaggaaacttcagttgatcttcttcatccaacttccaagacaagataccggtgcttctggaaactaccaggtgtgcctggaagagttggtctctgccctgcctacttttagttgactcacaggccctggagaagcagctaacaatgtctggttagttaaaagcccattgccatttggtgtggattttctactgtaagaagagccatagctgatcatgtccccctgacccttcccttctttttttatgctcgttttcgctggggatggaattattgtaccattttctatcatggaatatttataggccagggcatgtgtatgtgtctgctaatgtaaactttgtcatggtttccatttactaacagcaacagcaagaaataaatcagagagcaaggcatcgggggtgaatcttgtctaacattcccgaggtcagccaggctgctaacctggaaagcaggatgtagttctgccaggcaacttttaaagctcatgcatttcaagcagctgaagaaaaaatcagaactaaccagtacctctgtatagaaatctaaaagaattttaccattcagttaattcaatgtgaacactggcacactgctcttaagaaactatgaagatctgagatttttttgtgtatgtttttgactcttttgagtggtaatcatatgtgtctttatagatgtacatacctccttgcacaaatggaggggaattcattttcatcactgggagtgtccttagtgtataaaaaccatgctggtatatggcttcaagttgtaaaaatgaaagtgactttaaaagaaaataggggatggtccaggatctccactgataagactgtttttaagtaacttaaggacctttgggtctacaagtatatgtgaaaaaaatgagacttactgggtgaggaaatccattgtttaaagatggtcgtgtgtgtgtgtgtgtgtgtgtgtgtgtgtgtgttgtgttgtgttttgttttttaagggagggaatttattatttaccgttgcttgaaattactgtgtaaatatatgtctgataatgatttgctctttgacaactaaaattaggactgtataagtactagatgcatcactgggtgttgatcttacaagatattgatgataacacttaaaattgtaacctgcatttttcactttgctctcaattaaagtctattcaaaaggaaaaaaaaaaaaa

SEQ ID NO: 623 - DNA, 113 bp, Artificial Sequence; identical to SEQ ID NO: 500
  Homo sapiens

SEQ ID NO: 624 - DNA, 284 bp, Artificial Sequence
  Homo sapiens
acggataaaaacggaattatcgaatggaatcgaagagaatcatcgaatggactcgaatggaatcatcttctaatggaaaggaatggaatcatcgcatagaatcgaatggaattatcatcgaatggaatcgaatggtatcaacaccaaacggaaaaaaacggaattatcgaatggaatcgaagagaatcttcgaacggacccgaatggaatcatctaatggaatggaatggaataatccatgtacaggaaggcgagatcatcgcctcctgtacgaatggatatcc

SEQ ID NO: 625 - DNA, 344 bp, Artificial Sequence
  Homo sapiens
caaaccaagatggtgacaggtacgacctctgttcattctcactgctacactcccaccagctctgcctatggaatagtcattcttttattcctctactttcttaaaaaacttgctttcaccttactctatggactcgccctgaattctttcttgtgcaagatccaagaaccctctcttgggtctggatcgggacctctttcctgtaacactgggaggccaatgtgtgtggatgacatggaattactcaaaatgatctaggttcatttgtttcgacataccttataaagcaagccacagggttgtctgaaggagcctaactggcggtgactgagaagggggctcct

SEQ ID NO: 626 - DNA, 2271 bp, Artificial Sequence
  Homo sapiens
ggcttgaacccgggaggcagaggttgcagtgagctgagatcacaccactgcactccagcctgggcaacagaatgagactctgtctcaaaaaaaaaagaaaaagaaaagaaaatgagaaacgaaaccaagaccaaatggacctgcagtccttttataacctaatttcagaagttacattctatcactatctcactgtattctttttattagaaatgagtcactaagtctgggtcacacttaagtggaaggtaattaattaaacttcacctcttaaggggagctgtgtcaaagaatttggagacatatctacatagactacatccatctacatggactacaacaatgtcttttttcaaatgttaccttcccaatagagtttaccctgactactcatttaaagttgtaagctccatttgtcccccctgcaccttagcactcccatttcatcttaccatcctctactttttattttttctatagcacctagtttccaacatattgccataaaatttacttattttattatacttactgtttatggtctatctcctgtctgttagaatgtaagctcaacaaggacaaagatgtatgttttgtgcactggtctagcccaagtgcctagaacagtgcctccacacatagtaggcactctataagtgtttgttgaatagaagaagaaatcatatcttcccactcttttttattttcctcctcttatgaataggccagcaaataatcacctattggtagccttagacataggcagccttacatgtaaatagatgagtagcctatattcccattctaccacctgccttatttgtttgacatttatgttttctgaaaggcagtcccaacttcgggatgaagtgtatataaaccttgaatcttttattattgagaaatcccagaacctctctttttttagagccagttaagagactaacacctcaaaagtcaaaagaataagtacctaacaaaatcctggaaagaaaattagtcttagagtcacaagggctccacttccacagttagaagggctacccttttaccatgtacctgttgttcaatatgtagagaaagccataggattcagggtggtttttttttagtgtccatgtgggcatcgtaaaaaaggataagtctagatgcatgagaatatgctccctcctattatgtgtgtcagttctccgacctagaaaaacttgcagttaattcatcctttcggtattcggtcaggtgcatgcgggctgaatgaggttctgtgagcatataaggtatgataatattgccatcaaagagcttatagtgcttagtgaatgataataagggccatagtagtggagtgattagaaaaagctttctataaatggcaggacgtgaactgggctttgatttaggctttgattgaaaactatgtggaagacattttaggtgggaagcacttgggcaaaggatggaaaataagaataagaatggatgaggattagtagaaaataaagttagcaagataataacttgaggctaaattgtgggggccttaaatgttgggctggcagattagtgttttattctgaaggtggttttcagttttttttgttttttttttttttttttttttgcctgtaacacatttatttctccatttagttcaattgttaacgactgtcattatgtgctgtgattctcaagtggggacacatctcctaggagggagatggggcacattctccttgcacttattaattactgttgcagatagtgggaagccattgaaagttttgactggagaattgacatatgaaggtgatctttaggaatattaggctcttggtcatatgcttatgtgatttgaagaatagtgatgccattgatagactaggaagatcatgggtggggtcggtttaaccgtgggcatataaaagaattgttttccttactgaaaatatgaatgtaccagtatttgagctctggaatgaaaatctccagggaggaaggtatggctgtgcatgtttctcaactatattttgttttttctgaatttcaccttctctttggggttttctcactgtgaatcctgtagtaaccaggggttaccacttctttttttttttttttttctcaagaagagctaaaaagacctctttctttattttccttttgcaaaggcttataagggcttatgttttcaaaaggaaatttattaaaaattttaaagtaattttttaaaaaaattgttaaaattttgagagagaaaaaaaaaaaaaaaaa

SEQ ID NO: 627 - DNA, 545 bp, Artificial Sequence
  Homo sapiens
gtcttctttctctgctctaatggtttgggaattttgcattctctttctgttcttcttgtggctgcccttaaacttggattccgtgtccgtttgtgggattatccgcgtctataacttcgtgatgagttcctgatctccgtcttccaaaacttgggaagtcatccgagggtttgttccagattgttttgggtaattttaaaattttatttcacactaattttattctaggaatcgcttcttcatcttactgaagttttgatgcgacgttatagttatttaggcttaacgggaggttgcatgggttttgtggccgtttctggtgtcttcctggtgtgtttggatttgtgcttcgccacgtccgcacgtcacttctgagcccagtgcggtggcccctgagctcctgccggtcacgggctgtgtgttgtccccctcacaccagagacagtcgtttcttctcttaactcttaagccctcctcagtcactcggatgaactgattaaattctgtgcttttaatactaagcattaaaaaaaaaaaaaaaaaaa

SEQ ID NO: 628 - DNA, 3085 bp, Artificial Sequence
  Homo sapiens
gacaactcttacaagatcgttaagtttatttatctgttcaagtctaccatcttcactctctacgaactccagaactggatgggaaaatggaagcccagcaatcaatcatgaagctgagcacttaaaacagagatcccagcagtgtagaagaacccataaggggccgggcgcggtggctcaggcctgtaatcctagcactttaggaggccaaggcaagcggatcacctgaagtcaggagttcaggaccagcctggccaacatggtgaaaacccccgtctttgctaagatacaaaaattagctgggcgtggtggcgggtgcctgtaatcccagctactcgggaggttgagatggaagaattgcttgaacccaggagatggtggttgcagtgagcggagatggtgccactgcactccagcctgggcagctgagtgagactccgtctccaaaaaaaaaaaagaccacccacaacgagaaaagcctacttcctcctttcatggaaaattcatagagccaaggaatttgtgactaccggatagaaataaactccgttctgcaactctacccaaaactatacaaaacaccaaatataccattagcaaaagctatatagcacctcggacttggaggcaaagtatcaactacaattattatgatgagaaaagaagctggggcatggcaaacctctgaatgatttatcagaggtgctatcatgccaatcacataagatatggtaataatgcctgttaggactctttcataggatttcttttggtagttgttacataggatttttttgcagttattaaaaataaactacttacatatttgtacataatgcctctctcattatagttttcttgtaagattgtcactaaaagaatgacaagacacgtgagctgaaaatgatctcctgctgagggaaattctttttttttttgagacggagtttcgctcttgttgcccaggctggagtgcagtggcacagtctcggctcactgcaacctctgcctcccggttcaagcgattctcctgccgcagcctcccgagtagctgggattacaggcgtgcgccaccacgcccggtaattttttgtatttttagtagaaacagggtttcaccatgttagccaggctgctctcaaactcctgacctcaagtgatccgcctgcctcggcctcctaaagtgctgggattacaggcgtgagccactgcgcctggctgggaaattctttctttatattgtgctttccccagaacagagcagagtagcatcagccgtaaggatctgcgctgcatttctgagcaaagctgtgtcctcagagcaacaaagagttcggggaaacaagtaggatggtttcccctgaaaacacctgccacctactcaatcccatagaaagaaagtggacaccacaagaatgaccagaggccacttaactaagtggcttttcccctgtgcccaggcaggcattgagcttacataagggaatgaccttcatgacttattttcacccagaaaatataagttcaatttcaaaatgctcatagtgtggatggcaggaattcaactaggtaagaataagcttaattcccctcagaatacaagaaaatagttaaaaactctctagacattattgcagccaggatttcttccatttatggatgtgggtcctaaagaaaaagactttcattttctttggtgtgtgggggaaagaaaaacaggaatgtctgacaaactacgacagagcagcatgaataaaatacgtgtaactcacccctcccaaacaaaatcaaaggaccaaattagaaattttaaattgcctgctggttctcatacaaaaaacaatggcagaaaaactcttattaaagagcttttatctttcatgtcctaataatcaagaatcacctcttgtgattcaaccaacctctaaaacttaaagtgtcaggaacagtctcagcaccgcaaggaccagcacactgacccatatctgtgggcccggtggcccgggcccagagggaacccaaatcaactgcttccttggcagaactggccacacgcacaggtcctccttccaccagcactggtctgggtagaaagaccttcgacccctgttctcttaattatcataagcatgttggtcaccatcacaggccacttggcaaatagaaatgtttgtctccctgcttaaaaagacaaaacaaaacaacactttaacctctttgttccagacactatcttaacttaaacagaaaatgtttactagagtgtagtgggagaagaactttcttgatgcagatttggtatgttttggtccatgctcgttaacggtgtccagtgtaagctttaaaccaggaggtcaccgaggctgctgcagaggagatcatcccacctgcactgctgctcgcgatgggtggggacgcctgggtgctctgactctgggagacttccacagactgggaagggatatcacaaaaccggggactaggcaagttctcccagtctgtgcccaggtcggtttcttcatcgctgacgcgctcatctccgctctcatctgattctccagcaactccgggatccacaaattccatggactcctcaaggtctgctcgtacttcaaagggccctgacctgtgtgcagacaatgagggtctctttaggataacaaccattctcaacaccagaaaatatgccatcttcctgaaggccctcacctgaggggatgagggacgccgcacaccccattcattccccaagtctatgcagcactccgtgttgacatatgattgcgttttcctttacccaaataatctccacccaagttataaataaaatcatgataccacactttcccacaagtctgcctacttcattggtgatgaccgtgcataggaaaaaaacctattcactgagatggcccatgctggtcctaagtctgacttcctgttgtaaagaactgcagtgtctacgaagtaaatacacggcactccaatgagacaattctaacaaaaagccacttgatgtatactctggatattatttagtgtaataagtaataaatggtatacaaagaaaaaaaaaaaaaaaaaa

SEQ ID NO: 629 - DNA, 2669 bp, Artificial Sequence
  Homo sapiens
gctcctccaacctcccaccctaaaacatgcaacctttccttacccctatctgtagttaaccccgctgttagggatatttccacaccctcagttgcaaaacaccacacccctgtccacattacccttaaagaccccacactattgaagccaatctgctcctcccaggcaccacctcccaaaaagctgaactcatcaccctcactcgagctctcactctagcagccggacaacagttctctaatttaggaggatttaaaaccctggtagggacagtaatcttcatcactttttctcccctgtgttatcccactaataataaaagccactaaaactcttattgaaactacagttagccaccagacaattcagactatgctcctgctacaacgacacgatggataccaacacatctctcaagaataccctaaaaattaagtttttctttttccaaggagcccacaccacccctaagtcacgcctgaagtagttattgagaaagtcaccccttttccctttttactataaccaaatagacaggaatgaaagattctccccggggtctgaaagcttgaagagatgagtaactcctcccttctcaggcccagtcccaaggtgcaaggccagttgcgccagcagtgtgcatcagcaagacagcagaagcaggaagacagccggccagaagacacctaccctggctggaagacacgtaccccttgaagacagagagaggggccgtctgggtactgtgcagaagttacatcagactgagacacttcttgtttacaggaaactataaaacccctgcctcgtcctcacttggtgctgacgccattttaggcctcagcccacctgcacccaggcgctcgttaaaacagcacgttgccccacaccgcctcatgttgtctgttggcaggctctcggggttcgaaccaatacaagaacctttcataaactttaccttaaacattacagtctaaaggccataccattcctcaggcccaaagctgaatcttcccagcattgtttctccctcctcacttctcattgcatctaatcagtctagagactgtcccattccctagtcctctgtcctacagattctatctctccgaagtctccctacctgtccccacctcatcactctctcaggcccaaaataaggcctcatccctttgaccctggatcagcctcccggtttcctatccggcctcgccgcccccactgtctttttcccttggagtttgcttcccaccacactcccagaactttgccattgcagcagttgccttcgggtttgtcaacagaatcacctgggggaacttggtaaaaacatcccagactacttaatctgaacgttttacaaaactccccaggcgattatgaggcatagccaggtttgcaaactgctactctaaatccttgctacacatagggaaatgatcagcaagctcctgggaatctgttagaaacacagaatgtcaagtcccacccctgacctatggaatcataatttgcatttgaacaagatccccacaggattctcaactttgagaagctctgctctacagtgttgtcagaccatgcactccacaaatatttactggattttctctgtatcaggctaggaattgggagggtcaaggaccaaggtctttgactttgagaagttcacagaaccatcagtcagtcccctgctgtgccttcagaccaagtccagacttctgtactggacagctgggactattttccagccttgtcaccagctttcctgactagcacttgacataagagccaagctggaccactggccacttctcatggtgagtccatgcctgcctgcccacacagttgtcacagcccaggccacactctacccttctctgcctcaaaaaccccaggagggatcctttgaggtccatcacatcaccctttcttaaaattatcccagatttccctgctcagatgaaagacaggaattcccataactttgttcctaccgccttcatgtcattgatctcattccacttactcttttaaagtcaaagcgcatctcccttagctacccagtaaagaaggcatcatggtaagcagcttatctctccagtagcaataagctaacaactgtcacatcaccaaatcttaaaatagtattactaataattgaaatatgttaaataaaacatggataaatgcaatcagtgaaaacctcatcaatcatccccatctcccacttcaaatttatttagctatgaatttaagcaaagtacaaatgggttgcctctcttaagccaaagagaaataatttctaaattagataacacttacagctttccatacacctataataatgaaagactgaatatgctgaagatgaattatgtcgaaaaccaactacttttctgtagttgaccatttaacttcacataatacactacaaatttgaaaacacttcagatttgtattacaatcaattaaggaggggttgagaaaggagagagacgaagagaaagacaggaagtagaccaaaatatagaaaagggacacggatctataccaaatatctggctgctctaaaagtaaaaatataattagattcgttttttaagaagattaaacactggcaagaatgcctgtcttaatcctatccaaacgctggaagttctgttctc

SEQ ID NO: 630 - DNA, 2458 bp, Artificial Sequence
  Homo sapiens
cttgtcttacaatttttaattgtttaaaagaaggtttgatatataaaaacaagaaaaggagcagctttgagagttaaaaaagccgaggctgaaatgatgcattacaaagtatatagattctgtactccagataagatggggtttagagggagtggtagaaacatttgctccttaatggcaaaggtaataaactcctgctctcactgcaagaattgaccatgagatggggtcaggaatcttcaggggagcagacagtggtgtggcccttgtctaggtctccatttatacctgaagatggagcggaatacgcactccagatgcctggaacaccattgcatgggagtgtgggtcacggatccgagggatacacactctagatgactggaagtcaatagcctgggaagcgcaggtcacaccccgagggaaagggcttcaggatgaacatctgcagaaggcgtggacaaggatgggaggcaacagggtcactgggctttccaggactcagagaatcaaaaggcttccaggtcatttctggtagagctgttggtggttacaggaagcaatttggatcccagactcctggagatgaacagctttacggtgagctcagctctgagtgtggaagcactgccatcccaggggcttctgtcgcagaagaaacggaaatctggcaaaaggatggccaggctggccagaaaccactggtctagatagaaaaggaatatgctactgttgccagccaaggctttgtttgttttggggaaaaaatattgctctgagtgaaatatctatttctggcatctattaacaattggttatggttccttgttttaattatatcattacatttttaaaatgaaggatttaatttgcttttgctcctatttgttgctgatgtcgctcagttctccaaatggctgctgtcttcctctagtacttagtctgccatctagaagcaaattaaagacacccaagaaacttcagttattgtattggtaactataaaataatgattaacaaacagaaggacaggaagcgggagaaggcagtcaagtaggaagtagaaaatctaacactgagagagcaccccccaacatagggactgtgtggaggttttacccaaatgatgcttcatttaattttcaccaaaagaaagtgaggtccttccccatctgagggacaggcctctgacacccatctccgtagcagtcatcccacaggttggccatggctgagtaggtcagggacagacaccttctcgaagctgggctatcgtcctctcactctttgatttggaattcagtctttatcattgaagggttagaactgtaatagacaaacaattgggaattaagaggctgccagatcctgttatatggagtaacaaaataggacattagatggatagatggagagagacagaaagagagatggatagatggatggattgagagatgatagataacagatagaggacaggaaagaggagagaaagaaagaaagggcacgagaaaaagaaaaagagagagagccacgtacagagagaaatgtgcatgggaagcagagccccggttccagtttcttcctgtagttcccctgcattcctattccttggttccatgagacaccccaagtccttacaacaaactctcattctaagctaaaagtttgtttctgttgcctgcacacaaagactcctaactaataaaacagtgaacaaaatgactgatatctgtaatagggtaacctgataacacttttaagattgattagattgagaccaaacagaagggaaaacacctaggcaccgtgaagacctatacagtcattaacattctcctgacttagaacctgtgataattagggagtgacctgcagcagtttccttcactctgtgagccatgcatgcaaatgaggggtgcaggagaggaatgcagacctggggcccacccgcattcaagtgcaattgatggggccattgcaggtcaccctgatctgcccagtgcccctagctgctgctggtagacttgtaggatcctataatttaggcttctcattaattcagatgaaccgtgactttggtgtgcccttctccattccagttatgtggaagaaatttcatctcttggtcttttatgcattttaagatttgatagcaacgctagtggctcatgcctgtaatccagcactttgggaggccgaggtgggcagatcacaaggtcaggagatcgagaccatcctggccaacatggtgaaacactgtctctactaaaaatacaaaaaaaaaaaaaattagctggcgtggtggcacgtacctgtaatctcagctactcaggaggctgaggcaggagaatcgcttgaaccagggagtcggagattgcagtgagctgagatcgcaccactgcattgcagcctggtgacagagtgagactccatctcaaaaaaaaaaaaaaaaaaa

SEQ ID NO: 631 - DNA, 959 bp, Artificial Sequence
  Homo sapiens
atcaaagagctgttctttttagttgtgggtcaggcagttaagtcggagtagggtaggtgcttggaggtagagagtgagtagaagcatacttggtccttgagccagagggtgaacaaaactgggccccgttccttcagagggtgaccagcagacagaccgagggaagctgcagaccgtgggcacaaatccaatccaggctccccagggacagctggggtggggaagcataggagagggtgtgtgtgtgtgtgtgtgtgtgagagagagagagagagagtatgggaatgagaataactgtgtctgtagtggtaataagtgtgggcactggtgggatattgaagattctctgtcccagagccccagatcgatagcagagagaggaaggagacattaacaggaaggctgtgggagtctaaatgaggtgtgtctctatgcaaagtaggcacaggagtgaggggggctgattgttgttctgtttcagccaatttcctcactgttctgctcataaggggaaagtacagctggaatcaggactgcagtctacagttaacatatgaatagaaggaaattggccaagggtcattggtgtgtgtgataggaaagggggtttgttaaggagtgagttgtgggaatgggaaggtgtaggctaagaggcacggggccaaaaggtatgggcctgaggtgtaaggggagagtctgggagaggcggacctttgtagcttaagtctcttggttgccggaaggagagtacgatagacaagaactggatcccaactggagaggctagactggtggctggctgtgcccgttcatacattctcaattccagtaatgtaaaatcaatttttaaaaattgcatttgttaaaagaaaaaacatgacaatatttaaaagctaaaaaaaaaaaaaaaaaaaaaaaaaaaaaaaaaaaaaaaaaaaaaaaaaaaaaaaaaaaaaaaa

SEQ ID NO: 632 - DNA, 1901 bp, Artificial Sequence
  Homo sapiens
gcaaaatgcaaaaaaaaaaaaaaacctgctttcttcaaacaaaaaaaaattgcagggggaaaaatagacagaatgaggaagcagtatatgaaataatcaaattaaaaactgagggcagaggtgtggtaacacaggtctataatcctggggctttgggaggctgaggcaggaggatttcttgagcccaggagttgaaggctgaagtaagccacaatcatgccactgcactccagcctggatgacccagtcagactcttgtctctgcagaatataataataattttcatttaaaaactaactgggagcttttaaaaaaattgcaaatgggaggcaggactagcttgtggctccactcagagcagcatatggagacttgtaaacttttgctccaagaatgaccacagaaacataccaggaaagctcagagaatctacagaccctttgaaggaagcagcttgctgctgcagactccataagacagttgaaaagctgtaagtgcccaaagtgcaaaaggggaaacatccacccccctcccaatacacatcctcactggggtacctgaaggtccagatcatgggagaaggatttaacctttcctggagctgagacaaatataagagatgagcgaaatataggaatagaggaagcagaggaaagagccccgtgggcactcttggtccccagggaagccattgttgactttgtctcagaggggtccatggggagagatgccactagaattggggaaagactacagggagaaggaaacttccagctgaactttgtaacaatttcaagtaaactcaaagtttcctggacagaatctgggaaaggggtgacccaggagagaagatacagcacagaaactggggcaggtggggaggcacaaatcctgaaagctgcttgctttctcagtggagaggcttggagcctgagacaagttttcagccctgctcaccggctgcctggaaataaactcagtgctattggggtgcacagtgaaagtgagaccagcctttcaggctgcgttggagctggatgaggcctgtcactgcggcctttcccacttccctggccacctgtatgatgcagaagaggcagccataatccccctgagaacacaactccactgggctgagaaccacaaccccataccccacaggggctgaagcaggccctgcccaagaagagtctgagctaaaacatgcctaaccctgccctcacctgaaggtctctctctacctgccctggtagccaaagacaaagaacatagtctcttgggaactctatgccccaaaccacagcctgagacacccaaatacttatccaagcaaccctagggcaagcttgtattctccctatactactgcagctgatgctctcttgaaagcaccacttcctggctggaggccaaccaacagaaaacgagtatgctaaataaaaatacaaccaaggaccctcacagagtccacttcactcccctgctacctgcaccagagcaggtgctggtatccactgctgagagtcctgaaaatggatcacatcacaggaaatggatcatatcacaggactctttgcagacactccccagtaccagcccagagcccagtatctccactaggtggctagactgagaagagcagtaacaatcactgcagtccagctctcaggaagccctatccctaggggaagagggagagcaccacatcaaaggagcaccctatgggacacaagaatgtgaacagcagcccttaagtcaaatatcttccccctgacataatctacccaaatgagaaggaaccagaaaaaacagttctggtaatatgacaaaacaagattctttaacacccccaaaaaaatcacattagcttaccagcaatggatcaaaaaaaaaaaaaaaa

SEQ ID NO: 633 - DNA, 2302 bp, Artificial Sequence
  Homo sapiens
agcagagatgcatggtatagagctatcctgtgcattacgatagctgctagccacatgtggctgttaacactgcagtgtgctaggtctgaattgagaggtgccgtcactgtaaaatacataacaggtcttgaagatttatatattaaaacctgttcatcatctcaataatttttagattgattatatgtagaaataatatttttgtagtttgaatttaataagatattattaaaactggggccaggagtaggggctcatgcctgtaatcccagccctttgggaggtcaaggtggaagaatcacttgaacccaggagttcaagatcagcctaggcaacataatgatacctcatctctacaaaaaaataaaaattgaaaaattaattacacttggttgttttcatatttttgtgggattacaagataaaatttgaaaaatagatgtagcttgtgtttgtggcttgcattattttgctatttgaaagtccaagtatagagtgaggcacagcatagactggaggcacattgcttcacttcaaatcctgatccttccccctactcgttttgtggtctttggcaatttactaaatctgtctttcattctttgtcttatcatcttgtaaaatcaagatagtgatagtacctaactcaaaatattgttatgaggatagtttatatgtctaaatcatttagaacagtatctggcatagagtgcatactcttcaaatgtttgttgaataagtaaataaacccactggtcatgtgcaccttcaccccagtaggtagaattatcaaagaagtaatgcagtttttaagtagcagtttcgtgaataacctgtatttttctaggagcaatagtagcaattgtagactgacatggtgaacatttttgatggtttattagcttaatttccttctcctcactttcttcctctctccagaacaggtggaaggaaaggagcaaaactcaaatatattaatttcattactctctagtaggctttttgggagaatgattctgaaatggatggcaagtcaggaatttttttcttcgcattatggcagtttcctgttactttatgtaggtaccttgaaataaatctaacatatgaaaactcaagcttctatgttacagagtggattctttggatccattggagagcattgtcagcagccatccagacacctccatgtattcatgtattcattaactagagaagagacactttgaagtcaatcaaaatttaaaatatttatgaagcctatatataaagggaagatatattggttgtggcagagacactcttaaagtggcctccaattcttgtctcctggtgttcacacccttgcgtgggacattcctcttgcaagtaggcaggacctgtaacttgcataaccagtacaatatggcaaaggggatggaatattcatgatgacacatatgcagtaacatgaaaataagatgtcagcacccatccttctggagtttctcctttgcttgatggctttcagaaagtatgcagccctgttgggggacctgcatagcaagagacttctggcagcttctagtgactgaatgtggcctctgccaacagccaacaaaacactgccaagaattaagttctcccaacaactggattaagcttataagtgaatccttccccagtcaaacctctgatgagaccacaccctgccaacaccttcatttcagccttgtaagaccctatcagaggactaggtatagtagtgccaaactcctggcccacaatacatatgtgttcttttaagctgctagtttgtggtattattgttattcatcaataaataactaatacactggcatttttactttcccaaatttaacctccaagcatattttatggcaaaagcaagacatatgcattgaaattattgggtgatttttccttttcttctttttactagcatcagagggatttaagtatatgatacttagcagtagaatcagtcactatatttataatatttcacagcatttaaaacagtatatacaccaaagactttaggttggcagacaatgattcagttattcatatgttgatctgatataactatgttgttaggaatgtatgagacacatatatttgggtttctgaagacagatatgaactgaagacaattttttcaagttattagcatcttccaggtggtagttggaatactgaaatggattaaatcacctgatcatctgtagacattaaagaaggctaaggacagagtccctgaagtaacaacttttaaggatcatgcagaaaaagaatcagc

SEQ ID NO: 634 - DNA, 2355 bp, Artificial Sequence
  Homo sapiens
aatatttatgtatatttatgtgtgtgtgggataagtgtggatatgtttatacatactcatatgtatgtttgtgtgtgtatctgtctgtgcctgcctccattttcttttgctttagagaggctatacttgaggctgccatcaagagtgagaagtttgaagctggaagagcctgcatgggcccttcttgaactggtgcagcatgtgcagcatgacatcactcaagagttcttgtcagagtgataatgaatgtctggctattgtaaacgggaacaagaaaactatttccagctgtgtgacaaccaagacgacaaaaagcattgcagagaatattattgccacaaggaccctgcttcatctgggtctcagacgacgggaggaggggcattttggagcacgtgtttggcatctgtgaaccttttgttaggtagaaaacaaggcctgaatgaaaggcctttcaaccacttctggagcagagaagataggtagagttactcattataggcaggtttcattgtaggagtattcagtgaggacccccgccttggaagtctgtaatcagcatatgataaggatggtgtgttcttactaagagaataacacaactgaaacagaattgccttttgttaaggggatgctttgccttcttggactacgattgtggggagaaggattattgtcaactaagtgaggcattcattctgtacccactatttattgtagttccacagagaactgcttgctttactttctgactaggcacagaaaagtaaaggttcaaaggctagggcaagatgactgacttttccagatttagcacaatctgttctctggtcactttgagacgctgtcaatttagtttcatgcagctgatatcttggagaacttctgtgtccttacgtttggctgaggacactaaatttttttttttttttttttttttttgaggcagagcctcactttattgcccaggctggagtgcaatggcacgatcttggctcactgcctcctgggttcaagcaattctcttgcctcagccttccaagtagctgggaccacaggcgtgcaccaccatgcctggctaattttttttgtattttttggtagagatggggtttcactgtgttggccaggctggtcttgaactcctggcctcaagtgaaccacccgcctcggcctctcaaagtgctgggtttacaggcccaagccaccgtgcctggcctgaggacactaaaattaaaaaaaaattaagaaagtacggtccccgctcttgagtagctcatgaacatggagcgacatggactcaaatgattaagatcaggtaggtagtgatgaatacggtaaaccaaggttcaaacaaagagctgtctgcatatctgaggatggagagggtaagtcagccttagaggagggaaatgacttgcagcaggatgccagcctcaatggtctgtggagctcattccatgcagaagagtaatgaggaagacccagtgagtgacaggcttggggaggagtgcctgaaattgacggtttgtggcaggaagtggtgggaccaatctcgaagcttgtggaggtagaagggtactggagactactgtggacaaaaaagggcatgttgatgccattaccaggcaggacacgagagcatgatgattgttgcagtgaggcttgttagttttagacatgtctaaaaccatgcaggcagagattttcagctggtggctggcaatttgagtttgaagtttagctgagaagtcagttggcagtattcaggcataattgctaaatgtagaagtaagtgccagtaaaatgtgtgtgataagctggagagcacttttagagtgaaaagattgatatattttaacaaggacaaggcttatttcaattctttaggttatttttctttagcagattaaagtagttttatcggttatcaagcatttgttgagcgtttactatggcttctcttgataggtggtcctggggagataggaaggaaatggtgcaaatttcaacaatacccactggggtgaacaaaaaatccctgaaacaccccattccagctattgttatctggaaaaaaatccttacaataattagatggtgatttgacgtctgggggaagttgcagatatagttttaatttactgtaggactagtggcagtgagtctcatattgctgtcatataaaaggtaaaccttccagaagaactttggaaatttcagtagcctaaagaccacgctttgagaaactcgtaaaggtttgtcatagaggttttaaaagtctgatcaaataattttaagctttagttgcctactaaaaagtaggatgcagtacaagtttgtcctttacttggt

SEQ ID NO: 635 - DNA, 2148 bp, Artificial Sequence
  Homo sapiens
ggttcatgggtcaggtgtccacaaagcagacccggatgctgtgtgagccacagtcctctgcccacaaggtgcccggccttgaatgtccagcggtgactttgacctctgatgagccagcctggaagaggacagacctgtggagaagaggctcagggccccaagagcaggcctggcggggtgctgagggcaaggtggctatggcaggcttcatggaggggaggcggccaggagcctggtttggctgagcttgggcatggagtgggtaggcctctggtgcctgcagagcctcatgtaactggcatcaggactacccagttgccgccatgctcctggccccctacctgccttctccctgtgggtctctctctgtactacacacaccccgcctcttgaaggctgtctgcttccatctgacatgcattagaccccacatgcctgcaaacccacaccagggcacactggcttgggagcagatagggttactggttcctgaagctagggagccctcctcatctcagcctctctagttagtaactgtttgaccttgaacagatcgcttgatatcattaggtctcagcttcctcatctgtaaaatgggttcatgtttagtgtgtaggctggtgagagtcaagtgaaatctctgaatatgtaaagggactttttaaaccagtgattcttggccgggcgcagtggctcacgcctgtaatctcagcatttttggaggccgaggcaggcagatcacctgaggtcgggagttcgagatagcctgaccaacatggagaaaccttgtctctactaaaaatacaaaattagctgggcgcagtggtacatgcctgtaatcccagctactcaggaggctgaggcaggagaatcgcttgaacccaggaggttgcagtgagccaagatcacgccattgtactccagcccggggaacaagaacaaaactccgtctcaaaaaataaaataaataaaccagtgattctcagcgctggttgtgcacagcatccctgggacctttaacatctacagattgctggtccaccccaacagagaccaacttcaggagtccagacagcagtccagggggtgagatagtgtcgcctcgtctctctctgctcttctctgctacatacagctaaacggacctgcaaatgatacggcagacggttggtcacaggacaactctaaaggtgggaacagcaaagtggcctggcgaggcagcctcgggacctcaagggacagcagccctgcctgcccactcccacccccacccagcagcaggaggtggcccaggccagcagactcccagcctcccatgcagtggcaggaggtggcccagacctgcagactcccagcctcccatgtggtggcaaaaggtgacgaggcaggtgttttcctcctgcagccacactagcagatgggcaggtggccagcaggcaccccgcagtcctgggagtgaacccaggggcatggtctccacccgtggcaggcatctcccacccccacccagcgacacaggacaccccaagaagggcattttatccccacaggcagcaccggcagggacccaggtgggcagaccggcagctccaggtgaatttagcagaccagaatagcacttcagcaagcattctgaaaagcaaattgtcattggaaccgtagcctccaaaagaacaggctgtacacgcgaaacctaaacagggtgacagcctgctcaaatagaggatttaacacttaacaagatcagtcttctaacataatatccaaaatgcccaggatactgcagaaaaattacccgtcacaccaagaacaccgaagatcaatgatttgaatgaaaaaagacagcagaaggcccggcgcagtggctcacacctgtaatcccagcactttgggaggccgaggaggacggatcagatcacctgagatcaggagttgaagacgagcccgatcaacatggagaaaccccgtctctactaaaaatacaaaatcagccgggcatggtggcacattcctgtaatcccagctactagggagggtgaggcaggagagtcacttgaacccgggaggcggaggttgtggtgagccgagatggtgccattgcactccagcctgggcaacaagagtgaaactccatctcaaaaaaaaaag

SEQ ID NO: 636 - DNA, 1813 bp, Artificial Sequence
  Homo sapiens
ttttatttctagtttacaataaaagcatgtataatttagtataaaattgtaaatgcttcataggtaaaattttaagtgtaatattaggatagggcagcatctgagcaagaataataaaacttggtattacaaagctgggcgtctggacatgtcctgatgagctcatcatgtgccatctgcttcaataattctggccaccagcaaacatattttgccagtgagtactgtacaatcctacctatagttggttgactccttttttatgaatatttctacctggctatggacaacactatgacatgaaacatactagcaaactacaagttgtatattttaatagcacattttaaaactgaaggacaattaggagtcaattaagtctgcattgcctagattgtttccttcttcattcttttcaccttttgtagtaagaactgagaaaagtaaaccaagctattcccagtagctttccttaaatgtggtgacccatctgttgccatatgctaggcatctgcttttatcaccctcatttgtggtccttcaaagctagaagtgatgaattaacatcaaatttatgctaatctgtggtaggagagaacagctatttgcaaactatttaatctggccatagtcgttatcagatataaggaatacaggacaataggaatagaaatcagaaatatttttttgaattagtgcatgacttttaggtaactgtagcacctctatggttgtatttctgtatcagcaaaatgtgcgagtgacccttgcttgcaaatatttgttgattttacacccaagtgactacaatatccaatataatagggtagaatcattcatgaatgctcatgcaggtcagtctctgtttaacttcagttgtagaattgcttctttcttgaaagattattctttttttaatccagtcctaaactgtcatcagaaaatgttcatagaatatgaaaggccaattctacactgaccagaccataataaaaatattttcctattatttagtattgcggaaaaaagggaattagaatcagaacatcaagatatttgtcccatttctagcactaagtggtgatacaattttggccaagtcatcaagcttgtgtccacatatgtatcatagaacgcagtactctgactccaaaattaactatggtttcttttagcactagaaatctctgattcctctgtctgtctttagggtatattttcactgtggcttggaaatcataacttatgcatttatcgacacagttttcaatgcacatatgtaatttttcagagtaatacatataatatcagtgatatttacattgaaataacttttttaaagtaaaaattagataatgtgtattgggcaggttttgtatgctaaaaccatatataaataatcattttgaacaagagaacaaccagatcattactgaaaacaaattgtcagtttaattaacctacttaattacattatatttcaacatccttgaatgtggaagacattttaaaaaattaggccgggtgtggtggctcacgcctgtaatcccagcactttgggaggccgaggtggatggatcacgaggtcaggagatcgagaccactgtggctaacatggtgaaacctcatctctactaaaaatacaaaaattagccaggtggcaggcgtctgtagccccagctacttgggaggctgaggcaggagaatggcgtgaacctgggaggcggagcttgcagtgagctgagatcgtgccactgcactccagcctgggcgacagagcgagactctgtctcaaaaaaaaaaaaaaaaaaaa

SEQ ID NO: 637 - DNA, 2099 bp, Artificial Sequence
  Homo sapiens
cctctgatggcaccagtgatactttaatcaggacctattttaaatggataccatatagtatctaatggtaatattccatctctgcacagatataatatagtatacctattagatttttgtgaatagagcagatatttgctagggctcattacttttatttatttttactattttttttaacctccatcaccaccaccaccacctaggattcattacttataaaaaaaatatgtagtgtgaagaaaaatggcaaatgcagagtggtaaagttttataacatatttttgggtcaatttttagaaattatttttaaaagaagaggcataaggtagggatgttagaattctagtttgtggaaatgcaagggatcttgacgtgcctctttttgaaatattatgttaagaaaaacaacttgaaatttagacttaaagaaggaacaggttggagagtaaaagagatgaatttagtgttttggccttggtatatttgagatgcttctgagacaccctatgggcttgtctggagctcaaaaaaaaaaggtcagggctggggagagattgaggaatcttccgaagagagcagagatgataccctgggatgggatgagttagtatagatgtcttgaaacggttaaagatacagattccttgggtcctgcctttggagattctgattcagcacatctggaatggggctcgatccccgcctcttccttaacaagctccccaggccattccgatttgcagccaggttagcgcattggctcatctatcaactcaggtcttggctgttgctttgttgcctctaaaggggatcataaaatgtgaaagattcttctcctgttctttcaaaagagggtagtttccaaaacaaagcaagtttgagagatatattttgaggaaatatttgtgaaaacaccagaaatagtggagccacttccatttcaatcttctggatttgatttgtttgtccattaaaaaaggggggggtaattatttgtgtgtctgtgtgtgtgtgtgtgtgtgtgtgtgtgtggatttatctcagacattgaatgggtcatttttttcatattttccaaagtcacataaataataataattttaaaaattcagagtgctgggctaattttactacataagtagaatatacttagcagctattagtggcttctacactgaaatagaaccctgcagttatgaaaatcatacctgaaatttgagaaaagttgtttttgcacagtaatatagggtaaatgataactctggtagaaatagcctaaatgaagttcaataaatgctggacactatttgaggttgacttttggattttgttgtaagggttatctccagatctaagtgtaaactcagatcactccggtcttcctgaatcagacctatttttcatttgagacagatggaaccatcaagaatttttcccctttgactatgtcttggaagaacagggtgccattcctttcaggtgcatttaaacccaatccaagtagtcaaactgaagaatgcagagagcaatggctattacaggcctcaaagagtccgaatcctttgcaatggccatgaaccagtcttgccttttcagatgatctataagcctggaataggacagttttggaccatggtagggaacttggaaatgttagttggtctaaattcctggttatggaattaaaacaagttgtatctactttagttattaacttaatccagtatttttgttttggcttaatcctattagtgtcacattttacttttagaatatcttccactgttaccgggcgcactggctcacgcctgtaatcccagcactttgggaggccagggtgggcggatcacgaggtcaggagttcaagaccaccctgaccaacatggtgaaaccccgtctctactaaaaatacaaaaattagctgggtgtggtggcacatgcctgtaatcccagctactcaggaggctgaggcaggagaactgcttgaaccaggacctgggaggaggaggttgcagtgagccgagatcacaccattgttctccagcatgggcaacaagagtgaaactctgtctcaaaaaaaaaaaaaaaaaaaaaaa

SEQ ID NO: 638 - DNA, 1638 bp, Artificial Sequence
  Homo sapiens
aagaattcggcacgagtgaaaatgtaagattatctgagtaatggacaatttctaatattcattttttaaagtagctaactctgccttattatccccttccacttttcccctggatgggtgatttatataatggaatgcagtgtcattgattgtgtttgaaggaggcacactaaatagcacactattgttatcttgaaaatttgttttattttgtttttgcccattttttaaatcatttcattctatttttgcccatgtctcttgtaatgagctacacatgtaattagtacacagagttctggtgatgtattcattcatgagtttaggaagtgagattttcagcttcatttccttctaagcatctcaactaggagcacaggggagacaaaaaagattgcaacctctttatacagttgtgtttgacccttggcactctattcttacttcaattatcgtccattgtaatgatcccttttcatgtctagcttaaccctaaactgtgagttccttgagaataagaactttgtcacagtgatgttttaatatattctcaccacacaataaaggatctaagtgtgtgctcaataaatgggtatttgttgggaaatttaaacaagaaatagtgaattattttctattcactatttggataccctttctccaaagatattttttatttgagagtatcttatttacagtaaaaatcacaaatattatatatacaatttagttttgacaaatgtctacatttctatcctttacccaggccttcaataagaaaataataataatttttttcccaaagacataatctggttatttggttatttggctgaaacaatgaatatctttgatacatggattctttaataatgaatctgttatttagtatttagtcattacttcataatgattccaaatttcctaataacttcttcccccactatccacccccatcccctgcccctgcaaaaaagacaaaacaaatctccctttccctcaggaagtagttgatttggtgcctgtgtaaggtagttcatgcatttccttcttctgttttgttaccataccgtatgcttggcactcagtacaccaagaaaacaaagaggcattgcctgtctcgaagttgcttagagtctagtgggggagataatgcacacctgcatccatagcacagcaatgtgtacataataacaaagatctgaaaaccccagtcagttttctatgttttgtcctctttcacacccttccgagagttctatctaatgtaactatgaatggtcactgtgtctttatttttggcccagactcttctcaatgcttcagcctcacgtatccaactacctactgattattctgcttggacatacatcagccattttaaatttggcctgagttgaactcattctctttctctcccacattcattgtgttttcatttgttttcttgaaatctcctggttaagtcagttcaggttgctatagaaaaaaattttgggtctggcgtggtgtcttgtgcctgtaatcccagaatgttgggaagcctaggtgggcagattgcttgagcctcaggagttcgagaccagccagggtgattatgaggaaactctgtctctgcaaaaaaaaaaaaaaaaaaaa

SEQ ID NO: 639 - DNA, 1486 bp, Artificial Sequence
  Homo sapiens
gttctcggactctccgactgagcctctaactccttttcggacatccccaccgcgcgctccggcgcccgctactccagcctacggccggccggtttagctccaggcccgctcccccgcggagccggaggacacccagggactggagacttcgcgggactccccacccttccacgcctctcagatttccaggcgctgggggccctgtgcgaacttgactggcttcagaaaagccgaaggccgagtttgtactggcgcgcccaagttgcgttctggactttggagatgccaactttagcccggacacctgggctgtgccatccggaccactcgggccgcacagagtatgcgtgaccctccccattccctggcagcctcgagttctgtctctctccgtctgtttcactctctccccttgtcagtatccacttcctccagctgaggggccttgtctcactattgggaaacgctctgcagatgtcaaggcttaagacaggagctcccgcccccacccctgtggtcaaggagggccaggatcggggtgagcagccaaagcgaggggggagtgtggaggcagtgctgctgtgtttgaggacagtgttcatctcttgacaggcttataaaacacatcttgagttacattcagtccataaaaatcttcctatgctatgggtgtctgactttgtctttcacaacttagaattatttttaactctttaatttctttgggactttcccaggtagaaaatcttcaaccatactggaccgaaaacagattctgatttataatacgagtgttggagtgaacgtcaaaacgtccaaggtcattttgacctttcttaaaacagataattactagcctacctgtagccaccgatgtggctcatttcccacatccaaagagagaaatgagttagtttgaatgactgttattcttaaaatacgtgtacgggaccaggcgttagtctcacttagggcgctggtgaagattcattcagtagctagtgttcttttatcatggaggagtttggagtttttcaaacgttatttgtggctttatgcataacttactttgactttatcagtcaatgcatcgcagtatgggaatgatttagccctctgtggaaatgcagtggctttttagaacaattaagcaggttattttaagagagaacaacatgttttccaaaacaataacttggtggaaacaaatagcaagagtgtttggcagacgttttttggatgtgctacaggctttcctcccttgttgcttatttttattgacaaacatccctaatgtgtgtcatgtctttctctgtctctccccttccctctctttttttctcaaattatgtaacttttgaggacagttacttctgtgataaactcttcaagtaagaccgttataagatagatttggaaattaaagccccagttgcatttcagtaactcaaaaaaaaaaaactagttctagatcgcgagcggccgc

SEQ ID NO: 640 - DNA, 2527 bp, Artificial Sequence
  Homo sapiens
cttgaatcctggtggcagaggttgcagcgagccaagattgcaccaccgcactccagcctgggcgacagagtgagactctgtctcaaaaaaaaaaaaaaaaattccttccctaggggtagcgtgaagatataactcttctttattttcttccaaaacattttttgttaacatagaggtctttaatccacatggaatttatttgacatataaagggatctaatggtgtattctccatattgccaaccagtgttccttccatcgctggttcggtcgtccgtcctctcccccttgctctgtaaagccacctttcccagatgtcaaaagggctgtgcttctgcaggtctgttcctggggtcccttctgttgcactcgtgatggcctcttcctgtcccagcacagcccgacttcatgccagggctttctaccaaggctcgagatcatagggcgtgttgccctctgccctctggtcttttttttcttcttcttcagacttgttattgatgttcttaacatctttctctaccatatacatttctagaagcaacttgtcatgattcacaaaagaacttgagttttcatatgaaatgacattgagtttttgaatcaatttgggtaaaattaaatgttttcaagatattgagatttattttccaccaataagttatagttctccatttatttagattttctgcaatgtttttagtaaagttctacaattttctttataataagttagtgacggctgggcgtggtggcttatgcctctagtcccagcactttgggaggctgaggcgggcagatcgcgaggtcaggagttcaggaccagcctggccaacacagtgaaaccccatctctactaaaaatacaaaaaattagccgggcgtggtggtgggcgcctgtggtcccagctactcggggggctgaggcgggagaatcgcttgagcgcaggaggcagaggttgcggtgagtcaagatcgcaccgttgcactccaatcccaggcgacggtgtgagactccatctcaaaaaaaaaaaagttagtgacatttattcctaggtactctatagtttgggttattattttatttatttattttttagagagaagatcttgctctgttgcccagcctggagtgcagtggtgtgatcattggctcgccgcggcctcgaactcctgagctcaggtgatcctcctgcctcagcctcccgaggagctggtactgcagatgttgccactactcctggctaattaaaaaaaaaaattttttttttgttttagaaatgggtcttgctgtgttgctcaggctggtcttgaattcctgggctcaagcgatccttctacctcagcctccatggtagctgggactacaggtgtgagccactgtgccaggttgggttattattttaaaggataccttaaaatatgttttaattctttatcaggtatataagaatgttcttgatttctacaaccttattgaaccttcctaattcaaatattttttctgtggattctcttgatttatgtgtagatgagcaaatggtctgcagataatgacagtttggtttctttctttcaaattcatatttatgttgtttgttattttcctgtcttactggtttggccagaacctctcctacaatgttaaatagaagtagagatagcaagcatcctggacttgtttctgaatttaaaggaaatgttcctatcattttaccattaagtgtgatgtttgggtaggtttttagtagatagctattatgaggttaaaaaagttttcttttattctaatattgcttagaattttatcacaaatgagtcttgaaaattatggaacgctttttcagtatctattgagggcctcatattctttcttcaaataatgttttattctctcaggatatgtgtctaatatttgtttcttttgtatgatatatgttaaaccttatatgaatgttttcatctgtttctaccacatctcagatgttcttgataggaataatttctctatagtatttaaaatacatcttaatgtgttcattcctgttttattaatacttttaactgtgtatcttggctactaaagcaccataccaattcattcctatggtgtgccttttgaactgtaagtggagcaggaaaaagtttcatttaaaatgtattttgctaaatttaacaagaaatcaaaggtgtttcctgcttatatttttttcttactgcagaggttttagtatataccaaactcctgtgcatcaaaatggcaaaaatctaatctgaggcttataataatcttttgataccctaataaaggtaagcaaaaccatttaagaaaattgatgttaaaataacccaaataagcctgtgtcttaagatagacaaaagaaacaatatattgcttttgtatttaaagtagtttatttttactagagtttactaatttgtcgtattgtacatcctttgtatatgtggaaggtattcattattctaatgtaaccataaagcagaaaatctgtaaaagagtaatatgg

SEQ ID NO: 641 - DNA, 1033 bp, Artificial Sequence
  Homo sapiens
gttgcagtgagctgagatcacaccactgccttgcagcctgggtaacagagtgagactctgtctcaaaaaaaacaaaaaacaaaaaaacaaaaaaaaaaaccccagaaaaacaaaaaacaaaaaactcaaaatggaagtgtttgatgtggatgatctaaatagctgtagccagggaaacagaggggccttccaggtgcaaatgaagaacctagaaaggtgagcatggctcagagatagtttgcttagaataggaatggaggggctgcagtcattcaggtgactgacaaatgatcagagctcttttaaataaagcaatttactaaaaattacaatagcttgcagttagaaacaacttactctgccctgggcactgtgttaagggctgtgtatcaacaatctagcttaatcttcccaatagtccttccatccttccatgttgtcacatagtagcttctgttcatcttccaggcacagtgctaggtgctgggatgctaagatgagcaaaagaaaacagcgtttctgccttgagtagcttgcagtctagtggtgcaaacttgaaatgaaatgaccacacataccatgtcgacaggtgccaggaaaggcgagggccacagagatagcagagattataatggtggagtgggggttgaccccatcaggaggtccgagttgtgactgttagctgagagccgaaggatggagttccgtgttagaagagaggagggagaggcttccttagaaaaggaaacagccagcgaggctcagtggcccatgcctgtcattccagcactttggaggctgaggtggggaggatcgcttgaggccaggagtttgagaccagactatgcaacatagtgagacgccatctctatgaaaaaaatttaaaaaattaaccagacatgatggtgggctcctgtagtcccagctactcgggaggctgcagtgagctatgatgacaccactacactccagcctgggtgacaaagcaagaccctgtcttaaaaataataaagagaaaaaaaaaaaaaaaaaa

SEQ ID NO: 642 - DNA, 888 bp, Artificial Sequence
  Homo sapiens
agcgccccgccaggctgtaattccgcgggcccacgtgacctccggggccgcgccttcaggacgcgactccactggggcggaagttggttttgtgcggctctcaagaactaagtttgtgctgtgctgcgggatccccagggagcttccttatatcttcggcaggaccccttcttttttttttgaagattgattttgctagaagttatcctgtgatgggactccctaggggaatggaggcaccacgtggttaaggagtttgtgcgttgccgcccacatagtgtgggcagctgaggcgccgcccggatcagagccgcagggcgtctactctgtcactttcccaacctgacttttccggattgctatttcagacggcggttgcagcagccgacctgtctcaactccaccactgtagtcagagaatcaaaagcggtctgagttgcgaggtcattggggaggcccccacccccacattaccagtgaggaaactgagacttaaaaaagtgacctgacctggacacgggattgcctgacatcagagctggattcttaagttcctgttagtgttaaggcgctgctcagacttttagtaaaggtgagcgccatctactgccaagtctcacaaaatattcgcaaaatttgatacggttatcacatggtaaaaattagactttaaaagttgtatttaatgctgtgttttcagctgttgtacacttatgtaattttaattatgcaaagttatcctaataatataggaatattaattgctttcgtgaggtctgtcttgatgtgccacgatgacttttttgatgtgccaaaaaagatgactacatagtgcttttacctttttgctcaaatagaaagattttatttccaaaaaaaaaaaaaaaa

SEQ ID NO: 643 - DNA, 2144 bp, Artificial Sequence
  Homo sapiens
aggaacacttgtagtcacagccactcagaaggctaaggagggaggattccttgggttcaggaggtcaaggctgcagcaagccatgatcataccactacactccaatctggacagctgagtgaaaccctgtctcctcaaaaaagaaaaagaaaaaaaaagaaagaataagaaaactcacaaaatcagagaacttctccccttctagccaggcatggtggcatctacctgtagtccaactatgcaggaggatcacttgagcctaggagttcaagtctagcctgggcaacatagtaagaccctgtctccctaacaatttaaagattttaaaatgtttaatctttttttaaaaaattgctttggaacttttcccagttacctttacttgtagaaaaagtcttcagttgaggaatatatgcaaatactcttttataagaatttttattaaagacaatgttgatccaaagaccactccccaatcaagtcatcatagacctgtcttaatatgcagttgtagtagcaaataattcctggttctaaggagattgatgttgctaatctctaacaaccataaagtgaatgtacttctacctgatctttaaaatgattattcaattttagatttaaaacatcatttcaatcattgtaaatgaaatattttgatttaaaatccattatttgataatacaagtaacattctcagatttaaaaaataataaacttgtttcaaaaatatgtggactatgatcagaatttttattttttttaaatacacaagaacaacttgaaacatttataaacctctaagttactttcgtgaacatttctcatttattgtagtcagagttcctttctacaaaaagtaactctatgcccaaaatatgttgtaaatctctctgcatatatttcatctacctcacaaaaaaagatttatttatattaaagaattggttattatctcatgtaagatgctgaagccttagaaaattacaaattagtcatcatagtttattagtaattataggtatgaagaagtacaaaccaagtatagatttatattaaagcatttgaaaattattttggtcatgactacaataataatactgaattgaaaatcctcttaactacatataagaaccctattcaaagagaatccctaacgaaaaagcctagtattaattgaaaaacagtgaggaatgttttgttttgtttttggtaaagacatctttaaaaagacacatcagactgaatagaaaagtaacttttaagattaatatactatgacccaatagggtttaattcaggaatgcaaggatcgttcataatacataaattaattaatatcatttactctaccatatcaaatatgaaaaggacgtgataatactatactaacctcttaataagctagaaataaaaggaagctttagtggtacagtatgtctatcaaaacaaaatagcaattatatacctgagtttcatgaaacataagagttctccatatattggaagtcaaggatttctccatactattatacgatatttcctatagatctagctagtttggaaacaccagaataagaaatgaaatgaataaatataggaaaagaaataagaaaattataatttgcagattacatttttaaaaaatgtacacattgtgatttcaatttattggtgacaaaaattaaaaattaaaataaaaatttaaaagaatcagctgaaaaatttaacatccaataagatcatttagtaaggcttgagatataaaataaatatgaaatcagttgccttccaatgtatcaccaacaaccagttaaaacgaggaaaataaatgctattaataataaccacaaaaattacataaaatctaattaaagaattaacaagtaatgtgccaggtttttaaaatactgtattttactttgctacaaacatgtactagaggacatagaagatcagaacaaatataggagacttgtcacatttctgatggaacatctcgctgttataattaggtagttctctctaattacgttcagtataattcctgtaaaatcccagtgaagctctttctagaatttttagagtaggtcctaaagtttggctaattatttatgtaaaaataggcaaaaaaaaaaaaaaaa

SEQ ID NO: 644 - DNA, 1225 bp, Artificial Sequence
  Homo sapiens
ggggaggggaggggaggggaggcaaagagaggggaggtgagggaaagagaggagaggggaggggaagagaggggagggaagggcagggcagggcagagcccggcaggcagccctcagaggaggggcgcaggccccagcccaaggcctcccgcgcctgcccaggtcccggcctccatcgtccagggctctggggctcccaggggagacacccacgctcggccaagcccagggttccagaagcccaggggtggcggcagccgggctcagcctatggccaggctcgcattcagacatgcgccagcctcggtcggctctctccgggagacactaagatctcctcactgactttggtgttccttggtctcaccagcgcgtcctagctgtgccgagctcacacccaccctgtttggtgtaagccacaggtccacaacgttcatcagctctggaaatccctcaacaattgtgtccagtttcaccacgaattccttctccatatcctcaccattttcttttaccccctcatcaaattactcccttccgtctaatctgctgattaactcattcattttatcttaaattattatgttaacatatccaggccaggcacggtggctcacgcctgtaatcccagcactttgggaagccgaggagggcggatcaccagctcaggagatccagatcatcctggctaacacggtgaaaccccgtctctactaaaaaatacagaaattggctgggcttggtggcgggcacctgtagtaccagctgctcgggaggctgaggcaggagaatggcgtgaacctgggaggcaaagcttgcagtgagccaggatcacgccactgcactctagcttgggcgaaagagcgaggctccgtctcaaaaaaaaaaaaaaaaaaaattagctgggcgtggtggtgggcacctataacctcagcctcccaagtagctgtgactagagtgcaccaccacacccagctaattttaaatttttttgtagagacggggtctcatcgtgttgcccgggctggtctcgaactcctgggcacaagcaatcctctcgcctcggcctcctaaagtgttgggattacaggcatgagccaccccacctggccttatttatttttgctgtttaattttgggggagactcggagatatttactttcttggaaacacaacagtctattaaaaatgtacgctcatagtaatccaaaaaaaaaaaaaaaa

SEQ ID NO: 645 - DNA, 7933 bp, Artificial Sequence
  Homo sapiens
ttggtaagtatctgtagcattattgtcttgcttcagacatggaaatatggaagaccacgtgtcttccaatctgccatagaaatagggtagatgagtccttctgaaagcacactagaagacctctgttcttggcatggactccagtggtggggaggactcccttccatttcacttggttatatgtttgccagagatgtggtagcagagatgagtggttttccatcagcatccaagctagggagtttatatcagcctcctttgcagctaagtgtagtagctaaccaagttctggtcaatgaggtttgggtgaaagcgatgtggggcacttcccggccatacctttagaagaaaggtgtgagttcctttgctgtttctctattcagacatgcatgtgatggtagaaacaggagctgccatcttggattcaagagggaagccacatgttgaagatagctgagccatcctaccaccctggaatattccttgagagagaaataaactattgtctcatttaagcccctgtatattgggggtattctttgtttcagcagcttagattgtgtcctaacaaatatacccacatacccagatatgggtaaggacttgggccacccacatgttttaactatcttctggaatcaaatattggagatacaaatgactagttttagagcagtctagagtccaaggttgcaatgtattctcttgtttcctttatttaagtctgtgcttgagaaatgtctatggcttaaaatgggactggttagtgtaaagttggtgatagcagtattttccaaagtgcttttcagaaaacatatattaatgggaattcttccaaaaaaggtgtgggagatgatttgaagacagtatgtttgaaaaataacgggtcatataactttagctagtttcttcagagcctctagtgggaaatgaataccctaatcttccagtgggaggatacagcatgcaatgtggtccaatataatttggccatgaatctctttctttggaacacttagtaatgttttgtggaatcctagtgttcttctaaacataagttggaatgacagcattatagggttacaattatattgtattttactagtctagaaaacattctgtctctattaaggatgactatatctcatctattttgattgattcaaactttaactcatagaagacaccatgtttattttaaaggtctagaggaatatggcatatttggtcccatgggatatatacatggtacaagtaaaaaggactgatattttctttatgaaaataaaatgatataaatttgaatatatgaaataacattctaatagggaaccatttttatctgctttgaattatttggactatgggtaggattttactggaaaaaatagtgatacagccacaaaaataagtcaaaaaataagtcaaaaagttggtgtttgtcgaggagtggtggtggttgtgagatggaaaacatcagttggggctgttttgtggagggctgtgaatgtccactcaatttggaaggcacttgggaaccactaagggtttttgagcagcagttagggcaggagtaggattagtgttgttctttcagaatgagattctgacagcaggacagaaaagggtttagggtaggtgaatgctggagggaagcaggattattaggcaggaggtcactaacacccagggagaggaacgaagggaagatgattcaggggtaatttccagactttctgttttacattcccgctgttggcattatagtttgcatacagctgaaatgtggcttttggaagcataaaccaataacagaaaatgaaaaattagaagcacatgaactatacttgaaaacacgaaagccaaacctgtctcgtggctgcttttgacaccctgaaatgcttttcagggtgttggcatatatcacgtgaccttttcccccatgactctcctttcttcagcttacttgtggcagaagggttgagttatgcaattatgttctgtaatatgatatttatccagcaaaaggtatttactctttagttgaattgtctatgctcttaatgcggtggtcacacttctgtcaggagatttttacagcatctgggccacccacatctagcgttcaggggctgatgggaagctgcggatcttagaaggaatctacctgaagtctgaggagcttttacaacctaatgctcaaccattggaattcccagtttaaatttggtacttctgtacccttttatttccaagtgtataggctttggtggccccagaatagtttggcttgcattgtctggaatctcatgagacccccaaagtacattttgttaatttaaaataacctcttcccttttatttaagcacaccctaatttttttattgtctttaaaattttatgtgtccaaagggtaacaaaatgtaagcatggctatctacagggagacaatgaggctcattaattctcatctgcataaaagccatttccaccagcacagccgatttttctgttacaatgacatgcaatatattcagaaaaggatgtttcctaatagtcatgtcactagggtatggtctacattcagattgcttttaatacttactcttaagttctgccaaaaaacttttgtcataggaacgaatcattggaaaaagctgaagtttgtttattagctgtaattcatgaccttggcatgagttaacttgcaaataattactctgtgaaaagtagagccagttaagtgtgtattgcttgtattagtgtagacacctcatgaatgtcacctttgttacaattcttaaccaaatatctcccctatctgtagcaagctggaggtagtgatctcggtggagtttctgcttgattctgtaaccagcattgtagctttgacaatgaacatcctctggggaatttttttttgtccatgatgttatgtagttgggagtttggaatctcatggctaattttaggtccttttccatatgctgcttccccaggttcagtcacggatatgcaatatcattcatttgccttatcacaggtgaaataagcaaccacagcacaatgcaaaggaaaaagagtgataatgtaaaagacattttgtacggggtgtcaagaaggaaaaggttttatgaaacacgtagttttattctgaggttcatccaatggttattttatccaatccaagtttttaggacttacgagttgtgcagttccagggtgacactattcatttagaatataaagaggctggtgccctttgaatttgtgcagtgtgatgacactgatcttgtttacctgcattggaaactctccggtaacagaacgtctcctcatacccagtggaattaagttcaagcccttaagtagaggcagatatggtgctccagtttgcccccgctcatacctccaggcacctctcttcctactcccctccgcactctgtttcagttcatggaatgggatctgggcatcttggatgtccccatgtctttacatatgctactcttttctttttttttttaatactttttttttttttgaaacaaggtctcactttgtcgcccaggctggcttgtccctgggctcaagggatcctcttttttaagcctcctgagtagctggaattacaggtgtgcaccactgcacccagctagttactctcttctttagtattccttttcccactttatgttcactcaaagaaccctacacattcatccaatgttcagcagttatttactgagtacctactatgcacaatgcattgaactaagcacacagtgcccatttatagttttggattggatgggttaatcattggatgaacttcagaataaaattttctctttcatggagcctttttcttcttgacacttcgtgcaaaacttcttttacattatcacttttttctttcgcattgtgttgttgttgattactttatccgtgtgtttcctccttttggattataaatgcaagtccaaaacctttttatttgcttcccaacaaacagcttagtaaattggaaacagcaaaagtgcaagtagaatagactttgaagcatctcctcctactagtgggcaagttaattaatttttctaaatcccagattccccatttgtgtgttggaggtaagaatatccaacaaaatcagcccaacaaagtttattctttgctcttactgtgtctgtagactttaaatgagaacatatttgtatatttgcagtacagtgtcttacacactaagtatgaacctactaaggtgttcatccattagtagccttctttatatcccctgcctaggactttgaacatagtaggaactcatgaatatctattaaataaatgcactcaagatctctgtcattaaatatatttagatagaaataagggaattgggccaggtgtgatggctcatgcctgtaatcccagcactttgggaggccaaggtgggtggatcacctgagatcaggagttcgagaccagcctggccaccatggagaaaccctgtctctattaaaaatacaaaaattagccaggcatggtggcgggtgcctgtaatcccagctactcagaagactgaagcaggagaatcacttgaacctgggaggtggaggttacagtgagccaagatcatgccactgcactccagcctgggcaacagagtgggactctgcctcaagaagaaggaaaaaaaaaagaaataagggaattggcatgaattttgtacattattttttggcagtggtatctctgcacagtgggtcctgggaaacagtaaacttgccctccagctgtcttaaacagaagctgacttgcactgccttaaccatctttctgtcttttgacaagatagagtaattcttcgaaaatcaagccatatacatttttttccttcgaaagtgtctaagcaacaaaataaataaatgtattattcattctgggttgtgttaatttttcctgccagaggggaaaaatgaatttacagggaattcctggaagaatatcttgggacctaaaaataaaaatcatggttttattttaagcttgtcaacaggggtgacaagtgtaagaattgtagcccagatgtgcgggaagcaactcataaattctattttccactatgttttatcttgcctgccactttccctaaaatggaaatcatttttagtatcatagagcgagatgggaaacgtggaagtttatttgtaaaagtggcactatggtgagcaagcattcacagggacactggcctattttagcagctggcctctgggagagagggatgccctacagcttggcactggagctctttgggatgctgctgagcttgtcattgctgttcctctttggggtctccaggctgcttttaaattctctaggaggtgaccatgggaccttattagatgagctttaatttctctttctaagttggcttgtgcaaatacagatatctagttttttttcagtcagaggggagaggaaggatagagttgaggagtggacagtaagcatccccattcagaggcagatgcagcctggtttggggagacggtagaggactagaacatattagtgtgtatggagctggcctgggcgctgagatccagagtgaggaatgtgccagagattccatctgtttgagctggcatgaatcatagtgtgaatcagtagatctcttttcttagcaaaaaccagcaaaagcccttcttgtgagggtcatatgaagcggaaggagatgagattctatattgatttagtactagttcatgagctgccaaatctaaaaactaggagtcaggtcagataaaatagcatatttctagcttaaagttttatgatcatgaatcttatagaaacatagttaacttagaaattaaagatttaagattaagttagaaatagaagttgctagaagttctcaaatgtatacttctgacaacttggttaaatccctggcatatgcagaaaagtttctgtgattaaaaaataacagaagtatgagagtttttcgttgtccagccaattttgtagtctatttgagaaggttaaaaacaactgtaaaagctaagtaacaaggaaacaaaaaaatgatgagtatataaccagaaggagcccaggtactataaaagctaagtaacgaggaaacaaaaaaatgatgagtatataaccagaaggaacactcaatttgattcccatatcaggaagttcttgggttcagtgcaagacttgaaacctgacatggtttcattagattgtagaaaacgcttttttttttttttctggacaacagatggaaccatgttgtcggttgttcaaagatggacaggagacagaaatctatcaacctgaagtcagctccaactgcagctgtctgttctcctgaggactgtgctagtggtccacagaggtcaccttgcttatcacatgatattttcttgacgttagttgaagcacatcaccttaggtgacacatgagggccaaaggcctctttctcagggatgtatgtgaaagtgtggtgggttggggaccagctaaggaaaaaagacatgaaggagaatgcaagcatcttacagtcatcattcagtaagaaaactttatgactggacaaaggaaaacataaacgccctttaacctagaatgcaaatttctagtgatttttacttttttagtgtatcagaagtcactgagcaaggtaagtaccagcacttacagagacggagtcataaaggctgctctctaaaagtagaggatgtgcaaaacctgtagtaccatttaacagatttttgaccttgttaattatgtcattttgaaactggaataaatatgtaattcgaaggttgatttttctgaacaaaagtaagtcaagtcaaagttttctcagagtctactgtttgattcttgagggtattcagaattcaagattgatgtgcatttcaacatttcagtttctgcctaagtgaagcgtcacttaaagccttcgaaattacagatgtaaaatgaggttgcacgtgatgtcagtagctataattcctactctggaggtagctcgatgtgtctgaaggctgagtgagctgcggcaggatgaatgaatctttgacttcacgagatgctgttctagtctgtaaccttgtcgtgtggaatcagcccatctgatgctgaacactaacttgaaatggctggccgaatgcagagtaacacatcagagcactagaccggtggaaagaacctagattgcaagtccagtgaattatctgcatcttcattttgttaggtgtagatttacttttgttattggttgcaattgcaatattttaaaatcatgattatgcgttaactccatctatttctaaaacattggtatttgtgtcatttttagtgtagcttgatttttgttttcttctttctggtacaaaaacgagtttctccctccaacccctgccatgtatatctgtatcatgtatatctgtatctacattcctgtctactatcaatgcctactatttacaaggtagttcagttcgtttcagatcaactagaatttattgagtactctgtatgctaatccctgtaccaggggcttgggatataacagtgaataagttcctggggcttacatcagtcaatatagggttactgtctattgaacaagattatttttgggtttctatctatttggggatatgataatgcatgtatttattcctaaccatcacacaataatattatgaaacaatgttagtaggaggaagatgagagccttcattttaactgggaggacttggttctgtctaagatgttgcttttgttatgggttagtgcctattagataacattctgtttctgtgactgattatttctttttgaccttctgagttttagtttgtccactgagttttaggtaaaaaagaaaaaaaaaaaaaaaaaaa

SEQ ID NO: 646 - DNA, 10336 bp, Artificial Sequence
  Homo sapiens
tcagattgcctcctccttttctgtgtgtctaatctccctctgcttctcagacagctgtaatgacatttagggcccacaagataatccaggacaatctcatctcagaatctttaatgacatctgccaaaatttcccataaaagataacattcgcagcttccaaaggttaggacccagtatcttcagggtagcatttttgaacctgccactcaagggaagaaaatgcttcaaggattcaattgatcagcaatgtcaggtgtttctgaaagattaaatgtgaattaaaaaagtccaatcagtagcctcagagagtggaagccagattgagaggtgttaggagttaataaggtgttttgtagctagacgttgcaagatttcttgattgctttttctctgtgagatggaattattggagattgaaattttgaaaagaatggagaaaattttgtgttggagagaatggaaagtaattttaacaaagagggcattattgtatactcattgtatactgttgataccatgcatgaaatgatagctgaatcgtctgtcctcttgtgttactttgtccatttgcacttggatatagctatggagaaagcagcttgctgggttcatctggggttggtattttgcaagacaggaatctaaggagtttgatatgttggtttgcagtagtttgaatcctctactgcttaccccgtgaacatttttggtgtacctccactctgtcccatttagccaggatttacttaaggaatgcaaatgaaatagttggtaaaatagaacaatatcagagtaaacaaagatcacatattttcactcttaattatgggtcccctctgtgaccacaagaagcaacgatagttggtcacttctgaaaattgttataatacagtccagatgtgacttagaaagtctagggtaacagatttgctttttctatatgcatttttaaacctgcacagattttgtcagctacttttgtttttagtgctatttataactccctgttgcctttattcctaaagagctactgctgtttaagatggttgccagattggccatctgctgtttcccactagtcatcgatttttcatcaggtacataaccaaagcatttcttcttttcagtccttttggggagtttcacatcagtccactgtatagaagctgatagaatattttggtggtggcattctcagcatacatttctgaactggcagactgttttcttaccaggatctcattgttgatatactgcctagcttcctaatgctgcaagattaatcttcttgagtattttaaattcaaaatgtatttttaaaatatcttctataagcaaggctacaggctgaatacttttagaaatttaaaaaaattaattaaaaattttctaccttccaaatgcatatagttcttggggagacagtgtgtttgtcaatatgcccaaaccatataattagaattacaaagagacaaggaaaggtaaaatgctgtataagaattcaggaattctagataagattgtgatgtgattgtgcatatctcgcattctgtcttcctctttgtccaccgaaatccaggtagagtcagtaaacaaaatctaagtagatgctttctaaaagaaaatcatctaaaacaaagtgatacagaagggttaaaagttttttaaaaaaatccgtgaatgcttgaaaaagattgtgcaatttcaaaagaaaccaagaattgtaataatataagatgcggcagaattcaaggcagaaaacattaaacagaaaggatcattttttaatagatcatagtgggagattttaaccattgtctctgagagtaaagtattcggagaataagcaagaccataggagatactaagagatctagataaacttggcaggaacttccggtttcattgcttgacccaatacttctgtgaattacccactttatttctttattgttaaccctctctctcaactattgggtaccttctcaatttggttaatgagtcacttggcatacagttctcgggttctttgacattttctggtagaaagtgaatcctaagtattttgcgaaataaatttcagggttcttgtagagtcataaagaggcaaatgaatgaaatgaattaggcacatttcttttgagtccaagatctaattctgttcacacacacacacctttgcctatcaagcctaaccatgaagaaaatgatacgtaaacttctaagtgatatggtacacatttctgcttccaaaatgggatagatatacttttccatagttttacctattattcttgctaagtagagctaaaatccctggacattacatttaaaaacaaacataagaaaacagaaaaatggagagaactgggtggatctgctcaggacccagataatatcacagtaaaagtcctgagttttcttattaccttatgtatttcagaatggtgcagaaaagctggcaatccagaaatgttgggcacagacaaaagccccaggaaaaaaatgatgctctttagctggggaccaggaaaagggtagcctagcaagacagaaaataaccacttcagccaaagaacatagaagagtcaccctgattagcaaagaccaagtgaggacctagactttcacagtgtttaggctgtaacaagacaactcctcactccatagtggcagcagagccaatatgggaagcagtaaccataggcagggagcctgaactcccacgtatgcttaatatgagtcccttcttcccttcacccccaagttctttggtatacaaaagcctgtgggcggcaagccacccaggcaccgaggcaagagacaggggacacgagctgttccagtataataaaatataaaacaagaatagttataccagatatagatcttagatatgattatatatgaatatcattaatcattagtttgtagcaattactttttattccaatattatgataatcctcactctataatcatagtctaggaaaaaccaggccatacagagataggagctgaggggacatagtgaggtgtgaccagaagacaagagtgcaagccttctgttatgcccggacagggccaccagagggctccttggtctggcagtgacgccagcgtctgggaagacgcccgttaccaggcggatcgtggtccagcagtagcaaaaggtgtcaaggaacaacacccgctccttagcagactgggaagcgggggggagggtctccttttccccgggggagtttagagaagactttgctcctccacctcttgtggagggcctgacatcagtcaggctctcccgcagttatccggaggcctaaccgtctccctgtgatgctgtgcttcagtggtcccactcctagtctgccttcatgttccatcctgtacacctggctctgccttccagatagcagtagtaaattagtgaaaatactgatagtccctgatatgtagaaataatggcgtaagctgtctttctctgtctcctctccctctctgtctcctctccctctctgcctcagctgccaggcagggaagggccccctgtccagtggacatgtgacccacgtgaccttacctatcattggaggtgactcacattctttaccctgccccttctgccttgtatccaacaaataacagtgcagccagacattcggggccactaccggtctccgcgcattggtggtagtggtcccccgggcccagctgctttttctcttgtctctttgtcttgtgtctttatttctacactctctcgttgccgcacacagggagggacccaccgaccctgtggggctggtccctacaaaagcctagtgagaaacctgcacttccaccccccactaggcattttttccaccagagcaatgtcaaaggaagcttactataatggaatattaaaagtagatccagtcacctaatgtaataacccaaatatcccggtttcaatgaaaaaaacctctcataccaagaagcaggaaagtgtcagctcaaattagaaaagacagttaatacatgctgacactgaaataacacagatactagaattatttgacaagaatttttttattgtactttaagttttgggatacatgtgcagaatgtgcaggtttgttacataggtatacacgtggcatggtggtttgctgcacccatcatcccgtcatctacattaggtatttctcctaatgctatctctgccctagctccccaccccgcaacaggccccggtgtgtgatgttcccctccctgtgtccatgtgttctcattgttcacctcccacataagagtgagaacatgtggtggttggttttctattcctatgttagtttgctgagaatgatggtttccagattcatccatgtccctgcaaaggacatgaactcatcctttttgatggctgcatagtattctatggtatatatgtgccactttttatttatccagtctgtcattgatgggcatttgggttggttcccagtctttgctgttgtgaacagtgctgcagtaaacatacatgtgcatgtggctttatagtagaatgatttataagcctttgggtatatacccagtaatgggattgctgggtcaaatggtgtttctggttctacatccttgaggaatcgccaactgtcttccacaatagttgaactaatttacactcccactaacagtgtaaaagtgttcctatttctccacatcctctccagcatctgttgtttcctgactttaatgttcgccattctaactggcgtgaaatggtatcttgtggttttgatttgcatttctctaatgaccagtgatgatgagcttttcttcatgtgtttgttggctgcataaatgtcttcttttgagaagtgtctgttcatatgtttcacccactttttgatggggttgttttttcttgtaaatttgtttaagttctttgtagattctggatattagccctttgtcagatggatagattgcaaaaattttctcccgttctgtaggttgtctattcactctgatgatagtttcttttgctttgcagaagctctttagtttaattagatcccatttgtcaattttggtttttgttgccattgcttttggtgttttagtcatgaaatctttgcccatgcctatgtcctcaatggtattgcctaggttttcttctaggatttttatgtgttatgtcttacatttaagtctttaatccatcctgagttaatttttgtataaggtgtaaggaaggggtccagtttcagttttctgcatatgactagccagttttcccaacaccatttgttaagtagggaatcctttccccattgcttgcttttgtcaggtttgtcaaagatcagatcgttgtagatgtgtggtgttatttctgaggcctctgttctgttccattggtctatatatctgttttggtaccagtaccatgctgttttggttactgtagctttgtagtatagtttgaagtcaggtagtgtggtgcctcgagctttgttctttctgcttaggattgtcttggctatacgggctcttttttgggcatgtgcaaagacactcataggctcaaaataaagggatggaggaatatttaccaagcaaatggaaagcaaaaaaaaaaaaagcaggggttgcgattctagtctctgataaaacagactttaaaccaacaaagataaaaagacaaagaagggcattatataatggtaaagggatcaatgcaacaagaagagctaactctcctaaatatatatgcacccaatacagaagcacccagattcataaagcaagttcttagagacctacaaagagacttagacccccgtacaataatagtgggcgacttaatacccaactgtcaatatcagacagatcgagacagaaaattaacaaggatatccaggagttgaactcagctctggaccaagcggacctaatagacatcgatagaactctccaccccaaatcaacagaatatacactcttctcagcaccacatcacacttattctaaaattgaccacataattggaagtaaaacactcctcagcaaatgcaaaagagcagaaatcataacagtctctcagaccacagtgcaaacaaattagaactcaggattaagaaactcgctcaaaaccacacaactacatggaaaccgaacaacttgctcctgaatgactactgggtaaataatgaaattaaggcagaagtaaataagttctttgaaaccaatgagaacaaagacacaatgtatcagaatctctgggacacagctaaagcagtgtttagaaggaaatttatagcactaaatgcccacaggagaaagcaggaaagatctaaaatcgacaccctaacatcacaattaaaagaactagagaagcaagatgaaacaagttcaaaagctagcagaagacaagaaataactaagatcagagcagaactgaaggagatacagacacggaaaacccctcaaaaaatcagtgaatccaggagctggttgtttgaaaagattaacaaaatagactgctagtcagactaataaagaagaaaagataaaagaatcaaatagacaaaataaaaaatgataaaggtgatatcaccactgatcccacagaaatacaaactaccgtcagagaatactataaacacctctatgcaaataaactagaaaatctagaagaaatggggaaattcctggacacatatagcctcccaagactaaaccaggaaaaagttgaatccctgaatagaccaataacaagttctgaaattgaggcagtacttaatagcctgctaaccaaaaaaaagcccaggaccagacggattcacagccgaattctaccagaggtacaaagaggagttggtaccattccttctgaaactactccaaacaatagaaaaagagagacttctccgtaactcattttatgaggccagcattatcctgataccaaaacctggcagagacacaacaaaaaaagaaaatttcaggccaatatccctgatgaacattgatgcgaaaatcctcagtaaaatcctggcaaaccaaatccagcagcacatcaaaaagcttatccaccatgatcaagtctgcttcatccctgggatgcaaggctgtttcaacagatgcaaatcaataaacataatccatcacataaatagaaccaatgacaaaaaccacatgattatctcaatagatgcagaaaaggcctttgacaaaattcaatagcccctcatgctaaaaactcaacaaactaagtattgatggaacttatctcaaaatagtaaaagctgtttatgacaaacccacagccaatatcatactgaatgggcaaaagctagaagcattccctttgaaaaccagcacaaggcaaggatgtcctctctcactactcctattcaatatagtattggaagttctggccagggcaatcaggcaggagaaataaataagggttattcaaataggaagataggaagtcaaattgtctctgtttgcagatgacatggttgtatatttagaaaaccccatcgtctcagcccaaaatctccttaagctgataagcaacatcagcaaagtcttagcatacaaaatcaatgtgcaaaaatcacaagcattcccatacaccagtaatagacaaacagagagccaaatcatgagtgaactcccattcacaattggtacaaagagaataaaatacctaggaatacatcttacaagggatgtgaaggacctcttcaaggagaactgccagccactgctcaaggaagtaagaggggacacagacaaatggaaaaacattccatgcttatggatagaagaatcaatatcatgaaaatgaccatactgctctaagtaatttatagattcaatgctatccccatcaagccaccattgactttcttcacagaattagaaaaaataactttgaatttttttttttttttttttttgagacagagtctcactctgtcacccaggctggagtgcagtggcatgtgatcatagctcacagcaatctcaaactcctgggcttgaatgattgtcccgcctcagcctcctgaggtctcgctatggtgcccaggctggtctcaaactgctgggctaagcgatcctcctgccttagcctcccaaagtgttgggattgtacccatgagtcatggcacctcgccctgacacaaattttaaaggagtcatcaagacagtgcttcaacaagcagttatgaacatgcttgaaataaattaaaaaaaaaggaagttttcagcatagcaaataaataggtaaagaaaaaccaattggaaactttataactgaaaaatacagtaaccaaaataaaatcttaatgggtaaaactgtagcaaaactgacacaaaaaaaagaagacacaaatcatcaggagtaaaataagagatacaggttgagtatccttcatctgagatgcttgggtccaaaaatgtttcggatttcagattttttcagattttagaatatttgcattggttgagcatcccgaattcaaaaacccaaaatctaaaaatgctccagtgagcatttgctttgagtgtcttgttggtactcttaaagtttcagattttggagcatttcggatttcagattatcagatttgggatgctccaccactctggagcctgtggacatgaaaaggatactatttttaaaaatctacagaaataaatttgacaactttgatgaaataaactaagttttcagaaagtacaacatactgcaagtcactcagtatggcatagataatttgaatagtgctacaacttaatagaactttataattttaaaatgaaaataggcccgaatgatttcattggagaattctagcaaaggcttaaagaagaatttacactatttctgtgtagtctctgccagaaaataagggaatacttcctaattcatttatgaaatcagtattattttgctaccaaaagcaaagacaataccaaaaaaaaaacctaccaataaagaccaactcctttttaagtatagatgtagataatccttaacaaaatgttaatcagtataatccaacggtatataaatagaattaaacacaatgaccaagtggatcatagattctaaatgtaaaccctacaaccataaaacttaaaacatggaaaaaaaaatctctgggacatttgtgattcatttgtatcatggaatcctactcagcaataagaagggaatgtgatgtatatgcaactaatcagaactcttaaagacattatgctgagtgaagaaaagtcagctcgaaaagtcacatatgtatgactgcatttatagaacattcttgaaatgacaaaattatagacatggaggacaaataacagattagttgttgccagggattagggatggggttatgggaacagagagggaagtgaatgtgactataaagcaggtagtctttgtggcgatggaacagttttgtatcttgattgtgattggtggtagtgacacaaatctgcacctgtgataaagcgatacatagctatacacacacactgtactaatgtcagtttcctagttttgattttatattatagtaagatgtaaccatgggagaaactgggtgcagggtacaggggacctcttttgctatctttggaacttcctttgaatccaaaattatttcaaaattaaaaaaaaatttttttaaattatcctagctaaagcatcaagtgaaagttcttaagagaaaaaaagaaaacaagggaagggaaggtacaggatgtctgggaaattgtctgtgacatttaaactggtttttgcccagggggcatttgccaaatctggtttcctttcctcagcatcagagagcattgaggaacctgaggaaataataaggtctttctttctgggatgatgaatctgatacgttcttcctcttcaccttaaagctgagactcagctaaactggaaaccaccaccaatcccaccatccttcaagattgcagggaaagttgattttctgcatgcttcttagtttttaatgtgcatcagaatcacatggaggtcttgttaaaacaaagattgctgggcaacatccccagagtgtaagattcagtaggtctggggtgagacttttaaaatttgtacctctaataagtttccagatgatagtgattttgctggtcgggaaccacactgcaaaaattatttgtatagctaaaaccttgtcggagtgaatatgggggcaagatcactgctgagaattttaagcaaccagctgacccttgtataatttgcagtgcgaatttaacgctgtgtaggtgatctaaaaaaaaaaaaaaaaaaa

SEQ ID NO: 647 - DNA, 1712 bp, Artificial Sequence
  Homo sapiens
atatatttactattcattaaatggaagtgggtcaacataaaagtcttcattctcattgtcttcacattgagtaggcagaggaggagaaagatggggaggaagagaaggcgttggtcttgcagtcttgtcttaggggtgtggggagtgggggaaagaatattcatgtataagtggacccttgcaattcaagcccttgttgttcaagggtcaactgtaataggatatagctatttttcttcctctatcaaccaaatggtaagcatctattttgcagtccactctactgagctaaattatagatccagctatgctatttataattattttcttgatgaataaattttcaatttctcctctgaccatttcagaacatcttccaataactcataaaacaactgaagtaaaattgagtgctggaaaatatattcaccaaactttggtaatttaagttgactaaagtttaaaattaagtctaaaatagtttacacctatactgcataatccaacaattttaatttcagttgaagacatgttactaatataactattattaaaagagtagaggatgtgtaattaaccatatcttctaaaacatggttactaaaagaatatgtaacatcaatattgaccttggtttcttacacaagtgttgctaactcaatagtgaaggagacactattaaattttctgaacccatgagagatactagagatggggagtggaaagtgtttggttcagggatatctgaagaacagaagggcagagatttcttaagtgacgcctcatctacaagctggaaattcctaaaaacaagtagaaagcttataaacaacaggtgatacactcacctcactggttttagtaaattaccaatacagaaagtatccctagtcttaaaaacaagtggaaaatttgaactgattagtcatattcctttgattacactgtttgttacaatatttttctcagtaaacagaaataactaatttttttgttcttcattctttgatagaaattaaaatcttattctgtgaggattacagaatactataactcaaattataaagtagaataaactctttaaataattattcttcatcataaagtgtaaagaataagatataagaaaacaatttatttttaaaatttaatatactaaatgctcaaatatgttctactatagaataagttcttatcttaatttacagggcactaaaaacaattttaaaatgcttaatgttgccttttatattttaattggttaagaatatatatttgtttaatgcaaatcagaatcactatattaaaatgaatgttcttgaaaactcagtggggctgctctataatacacttacaattgatactaacgataaaacgctctaattatagttttaattttataggggtttttttggtgactttccccaaataaaacaaaatcaagacgcccaagtccagacacacaagagggcagacgtatataagataacaaattgctactacatagcgattatttatcttttgattatttttgagacttctggcaaagtaggactataataaattttcagaaaagatctgctcttctgctaagtaacagcacacttcaaaatgtccagaaattttatgctaatattacatagaaaacttgacagatgaaaaaagtgaaacacattactaattttattcattaaaacaggtatataaaagtc

SEQ ID NO: 648 - DNA, 2879 bp, Artificial Sequence
  Homo sapiens
aacgttctaacattactcctccttccctccctgttcttgtctctgtctattgtatctttatgtccatgtgtaccaaatgtttagcacattcttgtgagaacatgcggcatttgattttgtttctgtgttaatttgcttacaataaatagtctccagctgcatccacattgctacaaaggacatgattttgttcttttttataggctgcatcatattccatggtgtataggtaccacattttcttgatccagtctaccgttcatgggcatttgggttgattgtatctttgctattatggatggcttttgcctatattattggaaaggccttctaactggtgtccctgcttacaccgttttcccccttaaatgtgttttcaacatggtagccagagtaaccctttttataacaataaattgtgtaatttttttgttcagaaacttacagggcttaccatttcattcagtaaaagctcaagctcctgtatagtcagaccatatccttcatcacctgttacttttctcctctgactcttcagcctttttgtttttcctcaaactgatgaagccttcatggctgatgtcagatgttttgcccattgagatcttccttgttgactcagttgcacttggtcatatgattttcatttatttggggtatctaatcataatctgaaagttggctacttatttttacccctttgagggtccttgccctgtttttgtatccctgatagcgggacagccagatatctggaacttacaggtgttcaataaagttttgttgaatgaatattctggaatcacccaaccttttttttcccctccacttatttttcttctccctttcacggcctgaaagatgtcctatgtatatggttccacttatcactctcatcccagtttgtgatatactattccattatattactattattaatacaattccattgaacttgctcttgctgacttcaccactggacctacatgttggccaaatggatactttataattttagtcttgacccctgcctttggcacatttcttacctctagcacagcactgtccagtaatccacactttctgagacagtggaaatgttcagtatctgtgctgttcagttggtagcaaccagctacccatgcctattaaacatttgaaatgtggctgtgtgactagtggcaattatgttggagagtacagttttagaaactcctgtttttcttacatggcactacatttagtatcacaatctaattgtgcaagccagataggtaggagtcatctttattcctgttatttaatttttctcatctactatatccagttcatcacatcaacagcgcctgttgtttctacctcctaaatatttctttagtctaactactacttgtccctagtgccaccaccatctatcagctggaatattgctatagctgccttacaggtttcccttctttcctgttctcttctagttttttgaattttagtcagcacgagattttaaaaactcaaataagattgtgttattcacctgcttaaaacctttcatgactttcagtgtcacgtagaacagaaaacacttttcttaccaaaggctagagagctctacgtgatctggctatttttaacgtttcattgcactcacccttttcctctataatcaaactactctgatctcaagggttagttcttgaaagatgatcatgttctttaatgactttaggtttttgtgtgttattttctatttctgggatgtttattctctgttccttacatgctggcccttttgcatccttcttcaggtctcagcttacatgttaccttcaagaagcctttgaccactctgagtgggcccttccttccacttctgctgtgtaatcccactcccttctcccacttgttaattagttacatacttttttgtaattgtttatttggttgctgtctccctctcaagaatgcagggaccatgtctgcattctgcagtaatcactactgcacacccagaatctattacagatcctggcatgtagctgatgcataaatatttgttgaatgaaagtctgtacattgtatttatgctattggtattgctatgacctgaaactaaaaggagttgtggaaaagatttcttatggaacagaaatatcccttttgattaatatcacaatctcgtaaattgagaaaacaaaaaatatatactactggagcattcatgtatagttggagattatgactcatttattggtgtgtttttggactcagaacaaagatgagggaatattccttaaagctctgtattgaaataacgaaaagcagtcacattttaataatagaagcttcctagcgtactctttctgtaatcttcttttcctaaatgtaagagagcctcataattatgaggcttattactagagtaaggctgtcaaaggcagcaaaatgtctttctgtttggaagaataacataaacttgacatgtatggtgggggacagaaggtttcaaaagtttaagaatctgtgttgtcttaacaaatagatgcttctcaaggagcttacgctagtggttactctgtccagtcagggttttttcttctttaacttgggttcatttcctgatggcacacatgaagtttggatcatatggtttgactttagctatggtccttagctatggggagcagcatcagcgacctgtgacatgtaaattaaaaatacaatgccagggcccttccccagcccctctgatagagaacctcttggccatctgtatttttagatgttccaggttagtctgattaacacccttggttaagaaccattgggaggatctgattgccagtttaaggggaccttcaagcctgtaggtctttatagtt

SEQ ID NO: 649 - DNA, 1449 bp, Artificial Sequence
  NPM1
agaaaggagtggggttgaaaagcgcttgcgcaggacggctacggtacgggggtgggagggcttcggagcacgcgcgcggaggcgggacttgggaagcgctcgcgagatcttcagggtctatatataagcgcggggagcctgcgtcctttccctggtgtgattccgtcctgcgcggttgttctctggagcagcgttcttttatctccgtccgccttctctcctacctaagtgcgtgccgccacccgatggaagattcgatggacatggacatgagccccctgaggccccagaactatcttttcggttgtgaactaaaggccgacaaagattatcactttaaggtggataatgatgaaaatgagcaccagttatctttaagaacggtcagtttaggggctggtgcaaaggatgagttgcacattgttgaagcagaggcaatgaattacgaaggcagtccaattaaagtaacactggcaactttgaaaatgtctgtacagccaacggtttcccttgggggctttgaaataacaccaccagtggtcttaaggttgaagtgtggttcagggccagtgcatattagtggacagcacttagtagctgtggaggaagatgcagagtcagaagatgaagaggaggaggatgtgaaactcttaagtatatctggaaagcggtctgcccctggaggtggtagcaaggttccacagaaaaaagtaaaacttgctgctgatgaagatgatgacgatgatgatgaagaggatgatgatgaagatgatgatgatgatgattttgatgatgaggaagctgaagaaaaagcgccagtgaagaaatctatacgagatactccagccaaaaatgcacaaaagtcaaatcagaatggaaaagactcaaaaccatcatcaacaccaagatcaaaaggacaagaatccttcaagaaacaggaaaaaactcctaaaacaccaaaaggacctagttctgtagaagacattaaagcaaaaatgcaagcaagtatagaaaaaggtggttctcttcccaaagtggaagccaaattcatcaattatgtgaagaattgcttccggatgactgaccaagaggctattcaagatctctggcagtggaggaagtctctttaagaaaatagtttaaacaatttgttaaaaaattttccgtcttatttcatttctgtaacagttgatatctggctgtcctttttataatgcagagtgagaactttccctaccgtgtttgataaatgttgtccaggttctattgccaagaatgtgttgtccaaaatgcctgtttagtttttaaagatggaactccaccctttgcttggttttaagtatgtatggaatgttatgataggacatagtagtagcggtggtcagacatggaaatggtggggagacaaaaatatacatgtgaaataaaactcagtattttaataaagta

SEQ ID NO: 650 - DNA, 2591 bp, Artificial Sequence
  TP53
gatgggattggggttttcccctcccatgtgctcaagactggcgctaaaagttttgagcttctcaaaagtctagagccaccgtccagggagcaggtagctgctgggctccggggacactttgcgttcgggctgggagcgtgctttccacgacggtgacacgcttccctggattggcagccagactgccttccgggtcactgccatggaggagccgcagtcagatcctagcgtcgagccccctctgagtcaggaaacattttcagacctatggaaactacttcctgaaaacaacgttctgtcccccttgccgtcccaagcaatggatgatttgatgctgtccccggacgatattgaacaatggttcactgaagacccaggtccagatgaagctcccagaatgccagaggctgctccccccgtggcccctgcaccagcagctcctacaccggcggcccctgcaccagccccctcctggcccctgtcatcttctgtcccttcccagaaaacctaccagggcagctacggtttccgtctgggcttcttgcattctgggacagccaagtctgtgacttgcacgtactcccctgccctcaacaagatgttttgccaactggccaagacctgccctgtgcagctgtgggttgattccacacccccgcccggcacccgcgtccgcgccatggccatctacaagcagtcacagcacatgacggaggttgtgaggcgctgcccccaccatgagcgctgctcagatagcgatggtctggcccctcctcagcatcttatccgagtggaaggaaatttgcgtgtggagtatttggatgacagaaacacttttcgacatagtgtggtggtgccctatgagccgcctgaggttggctctgactgtaccaccatccactacaactacatgtgtaacagttcctgcatgggcggcatgaaccggaggcccatcctcaccatcatcacactggaagactccagtggtaatctactgggacggaacagctttgaggtgcgtgtttgtgcctgtcctgggagagaccggcgcacagaggaagagaatctccgcaagaaaggggagcctcaccacgagctgcccccagggagcactaagcgagcactgcccaacaacaccagctcctctccccagccaaagaagaaaccactggatggagaatatttcacccttcagatccgtgggcgtgagcgcttcgagatgttccgagagctgaatgaggccttggaactcaaggatgcccaggctgggaaggagccaggggggagcagggctcactccagccacctgaagtccaaaaagggtcagtctacctcccgccataaaaaactcatgttcaagacagaagggcctgactcagactgacattctccacttcttgttccccactgacagcctcccacccccatctctccctcccctgccattttgggttttgggtctttgaacccttgcttgcaataggtgtgcgtcagaagcacccaggacttccatttgctttgtcccggggctccactgaacaagttggcctgcactggtgttttgttgtggggaggaggatggggagtaggacataccagcttagattttaaggtttttactgtgagggatgtttgggagatgtaagaaatgttcttgcagttaagggttagtttacaatcagccacattctaggtaggggcccacttcaccgtactaaccagggaagctgtccctcactgttgaattttctctaacttcaaggcccatatctgtgaaatgctggcatttgcacctacctcacagagtgcattgtgagggttaatgaaataatgtacatctggccttgaaaccaccttttattacatggggtctagaacttgacccccttgagggtgcttgttccctctccctgttggtcggtgggttggtagtttctacagttgggcagctggttaggtagagggagttgtcaagtctctgctggcccagccaaaccctgtctgacaacctcttggtgaaccttagtacctaaaaggaaatctcaccccatcccacaccctggaggatttcatctcttgtatatgatgatctggatccaccaagacttgttttatgctcagggtcaatttcttttttcttttttttttttttttttctttttctttgagactgggtctcgctttgttgcccaggctggagtggagtggcgtgatcttggcttactgcagcctttgcctccccggctcgagcagtcctgcctcagcctccggagtagctgggaccacaggttcatgccaccatggccagccaacttttgcatgttttgtagagatggggtctcacagtgttgcccaggctggtctcaaactcctgggctcaggcgatccacctgtctcagcctcccagagtgctgggattacaattgtgagccaccacgtccagctggaagggtcaacatcttttacattctgcaagcacatctgcattttcaccccacccttcccctccttctccctttttatatcccatttttatatcgatctcttattttacaataaaactttgctgccacctgtgtgtctgaggggtg

SEQ ID NO: 651 - DNA, 1908 bp, Artificial Sequence
  SEPT4
aatcagaggaggaggggactgcagaggaaccaagtgatcctgctgcagctgagctgtccttggagggtgggagccaagggaaggggaggagaagaggggtggggaaggacattccacaggcttttttggcccctgccagagacagaagggggtcaaagagaaagggaaaggagcaagccaggaagccagacaacaacagcatcaaaacaaggctgtttctgtgtgtgaggaactttgcctgggagataaaattagacctagagctttctgacagggagtctgaagcgtgggacatggaccgttcactgggatggcaagggaattctgtccctgaggacaggactgaagctgggatcaagcgtttcctggaggacaccacggatgatggagaactgagcaagttcgtgaaggatttctcaggaaatgcgagctgccacccaccagaggctaagacctgggcatccaggccccaagtcccggagccaaggccccaggccccggacctctatgatgatgacctggagttcagacccccctcgcggccccagtcctctgacaaccagcagtacttctgtgccccagcccctctcagcccatctgccaggccccgcagcccatggggcaagcttgatccctatgattcctctgaggatgacaaggagtatgtgggctttgcaaccctccccaaccaagtccaccgaaagtccgtgaagaaaggctttgactttaccctcatggtggcaggagagtctggcctgggcaaatccacacttgtcaatagcctcttcctcactgatctgtaccgggaccggaaacttcttggtgctgaagagaggatcatgcaaactgtggagatcactaagcatgcagtggacatagaagagaagggtgtgaggctgcggctcaccattgtggacacaccaggttttggggatgcagtcaacaacacagagtgctggaagcctgtggcagaatacattgatcagcagtttgagcagtatttccgagacgagagtggcctgaaccgaaagaacatccaagacaacagggtgcactgctgcctgtacttcatctcacccttcggccatgggctccggccattggatgttgaattcatgaaggccctgcatcagcgggtcaacatcgtgcctatcctggctaaggcagacacactgacacctcccgaagtggaccacaagaaacgcaaaatccgggaggagattgagcattttggaatcaagatctatcaattcccagactgtgactctgatgaggatgaggacttcaaattgcaggaccaagccctaaaggaaagcatcccatttgcagtaattggcagcaacactgtagtagaggccagagggcggcgagttcggggtcgactctacccctggggcatcgtggaagtggaaaacccagggcactgcgactttgtgaagctgaggacaatgctggtacgtacccacatgcaggacctgaaggatgtgacacgggagacacattatgagaactaccgggcacagtgcatccagagcatgacccgcctggtggtgaaggaacggaatcgcaacaaactgactcgggaaagtggtaccgacttccccatccctgctgtcccaccagggacagatccagaaactgagaagcttatccgagagaaagatgaggagctgcggcggatgcaggagatgctacacaaaatacaaaaacagatgaaggagaactattaactggctttcagccctggatatttaaatctcctcctcttcttcctgtccatgccggcccctcccagcaccagctctgctcaggccccttcagctactgccacttcgccttacatccctgctgactgcccagagactcagaggaaataaagtttaataaatctgtaggtggcttctggaa

SEQ ID NO: 652 - DNA, 8450 bp, Artificial Sequence
  CPEB4
tttccagctggttgtcatttcactcggctcggtcctgaggagaaggactcagccgcggctgcgggacccgggcaccgggaggcggtggcggcggcggcggcggcagcagcggcgacagcagaggaggaagaggaggaagaaggaaagaaaaagaagaaccaggaggagtcctcaacaacgacagcggggactgcgggaccagggtaaagcggcgacggcggcgacggcccagcaaccgtgaggagaaacaaaagccttctaaattatagtttaaaaaaaaattctgggggaaaagagagagaaagccgaggggggaggcccttctcctttaaaataactacggtagtgggtttttcctttttttcctcttttttccctctctgcggagaatcgaactgagggaactgaacaaaccgcccctgggtcccatgagggaaaaaaaccccggagccgcagagaggggaagaggcagaaaccgcaggaccttccaggtcgccccctcggtccccgcacccccaggccgcccgctcaccctcgtcgagtctcgctaatccctcctgatcgcgacccccgcaagagggagaaacgggtgtttccaacccctttcatgggggagaggaagccgcggggagcccaggaacagcgaccgcagcaagatctgcacccggagcctcaggaacagccccagaggccaaaactgcaccctgcgaaagagcagaaaacaggaccaggaacagcagaaacctccctgcaatcatctttccattagtcaatgctgatttcctctcccgaaaccaggaattcacttcccaccccagataacctaatataatctatatatataaatatataatatataatgttcttaaattattcctgatttttttttaaccaagctgccaagaaaagaacgtattcccctcttagtcctattctaatttttatgtgagtgaatctaaactgctgaggaaaaccatatgtgattgttaaattatatatatctatatttttactccgcgcaaggcttattcttctacatccatagatgcttgagaagctctgtttttgtcattcatgtacattttcctttggaaaaagaaagcgcctattttactaaccaaagacttgatttttaccctcttcatttttattccctcctaaaaataagcccaattggatccaagtcaatgttttaagagatttttttaagagttgttttttctttcagagaccagaattccaaatcagaacaatttaaggtgataagctgcgatctttgagctagctataaataagacatttcaagcaagcaagcaaacaacttaaatttggggtagaggaaaaaaaaggcgtgagacatcaggttgtcattttttattgtgagattctgctcctaaagataataaatgggggattacgggtttggagtgctagtgcaaagcaatactgggaataaatctgcttttccagtcagattccatccacatctgcagcctccacaccatcaccaaaatgccacccccagccctgctgcttttataaataataacacagctgccaatggcagcagtgctgggtcagcttggctttttcctgctccagctacccataacattcaggatgagatcttggggtcagaaaaagcaaaaagtcagcaacaggaacagcaagaccccttagaaaagcagcagctttccccaagtccaggtcaggaagctggaatactgcctgaaacagagaaggcaaaatcagaagaaaatcaaggggacaattcttcggaaaatggcaatgggaaggagaaaataaggatcgaatctccagtgttgacagggtttgattatcaagaagccactgggctaggtacttcaacccaacccttgacatctagcgcatcgtctcttactggtttcagtaactggtcagcagcgatagcgccttcctcctctacaataatcaatgaagatgcaagtttctttcaccagggaggggtccctgctgcttcggctaataacggtgctctgttgtttcaaaatttcccccatcatgtcagccctggctttggaggcagcttctctcctcagatcgggcctctctcacagcaccacccacatcaccctcatttccagcatcatcacagccagcatcagcagcaaaggaggtctcctgccagtccccatcccccacccttcacacatagaaatgctgcttttaaccagctgcctcatttggcgaataatcttaacaaacccccctctccgtggagcagctaccagagtccgtcaccaacaccctcctcttcctggagcccgggcggtggtggatatggtggctggggaggttcccaaggccgagatcaccgcagagggctgaatggtggaataacgcccctgaactccatctcgcctttgaagaaaaattttgcaagcaatcatattcagctccagaagtatgctcgccccagctctgcctttgcacctaaatcctggatggaagatagcttgaacagggctgacaacatttttccttttccggatcgccccaggacattcgacatgcactcactggagagttcactcattgacataatgagagctgaaaatgataccattaaaggtcgtctaaactattcatatccaggatccgatagctctctgcttattaatgcaaggacatatgggcgaaggagaggtcagtcttcactgtttccaatggaagatggattcttggatgatggccgtggggatcagcctcttcatagtggcctgggttcacctcactgcttcagtcaccagaatggggaaagagtggaacgatattctcgaaaggtgtttgtaggcggattgcctccagacattgatgaagatgagatcacagctagttttcgtcgctttggccctctgattgtggattggcctcataaagctgagagcaaatcctattttcctcctaaaggctatgcattcctgctgtttcaagatgaaagctctgtgcaggctctcattgatgcatgcattgaagaagatggaaaactctacctttgtgtatcaagtcccactatcaaggataagccagtccagattcggccttggaatctcagtgacagtgactttgtgatggatggttcacagccacttgacccacgaaaaactatatttgttggtggtgttcctcgaccattacgagctgtggagcttgcgatgataatggatcggctatatggaggtgtgtgctacgctgggattgataccgaccctgagctaaaatacccaaaaggagctgggagagttgcgttctctaatcaacagagttacatagctgctatcagtgcccgctttgttcagctgcagcatggagagatagataaacgggtggaagttaagccatatgtcttggatgatcagctgtgtgatgaatgtcagggggcccgttgtggggggaaatttgctccatttttctgtgctaatgttacctgtctgcagtattactgtgaatattgctgggctgctatccattctcgtgctggcagggaattccacaagcccctggtgaaggaaggcggtgaccgccctcggcatatttcattccgctggaactaaaggataactgcagtgctcattttcaggcctcagaataagtgcactcttctgttcattctgaccccttcctcaacctcttcacgctggcatgtccttttgtagcagtctgtaacttaactatagtataatgaaaagaatgacctataatataggtgttttgtagattcttgtgtcactgcaaacaatatgaactcctttttcgtattgccatcgggttgcatggaagttttattctcttgttttgctggaaaccaagaggatccaaacttcctgcaacattttcttagaggagagagagaaatattaaaagagaaatgaaacaatagagtattttgggtttttaattaaattattgttaataatataacatataagaatacttttattaaaataaccatgcaacaataacactatcggtctatctgacagtttttcccccagggaagtgcttttgccttttcctttcttttttttttttttttcatcttttttgtctctctcttttttccatccctttttaatttttttaacagcaatggaggaagttaacaatttttaatggaaagagcatgttagagcaaacaaatgcataagcaagactgagcagcattataattaattttcagggttttgaggctgaacataatttcattatccctcaaaaagttaccaccacatcagaaaaaataaaaaaaaaatagtaaagtaggcagagctaggtttattttctcttaaacaatttttaaaattcagaatgtaaaaattgggtaaatttactactgaggggagtgcacttatttatttaacttacttatctggtcaaagccccaggaaacctaccaaagctagaattaatgacaactggtgggaaacctagcatttcctctcctgaagaataaatgtataaatgttatttttgatgtttatatataaactctatatcctaatttactaatactcatcagatgtcagcctttgctctccattttgacgttaaaaaacaacaacagatctagagatacctcaaggatatcatttttgattttgtgttacagtacacttgtagccaaaactggaagacaaaaccaatatataatttggctgctgattggcttacttttagatttaaagttactttgggtatcctgtaatttagttgtaacatagaaaatgaaaaaacagttaaaaaaagtgaagtagttgcaaagtgttttgcactgttgaactaagtaactgtgtaaatctgtgcaaaggtacgtatgtttatcttactcttcctataaactaaaataacattacagtttccgaatttagcatgggacatagtcagtgtttgaagtgccaacttcatcaagtaatgcatgctttattataaataaaattctagctttgaaaggcgttatgtgttgaacagtatgcttcaggggtaaatttaaaatagtctcttgaagccctagtcatggaagtaacttttattttaattgacattctcttattaaatgccctatccatcattaaaaggtttattatcagtgggcaaaacatgaaataatatgatcgaatggcaatcttgctagttgcgctacctaacagtaccatcttggatccttcaaaaccaaagacttgccccagcactgctgtggaaccacctggcttatgacccctatggatgatctttaggaaaagcagccctttacttttaatacaggctttaatgaactatacctgttaagttccaaaggtcaaaatggaggcatttgctgtctaatattcaaacatagaaagggagctgcttttaaagaattccctgcaaatactgaaagcagtcatgcgaatggagggtgctcttgtgtagctggtcagggacttttttttcttttctcctgaactacatgattctaattggaatgttcatttgcctctttttactcttttaaatgcttgtaggtggcttggggtgtgctatcgtgctgttcctactcagtaaacaggtgtgatgagttaacaagaaataacactgtttgagaactagctttgaataataatttttccctttgtacatgacctgctgaatttcggtacagtgtttttgtagctaacttattttgtcatgcacataatgtatatttgttatgcactacttttgtatatcttgtttttccaacagtgaacatttttaggcacacttttcactgacgggatatctctttatgcaatacctcaatttttcatattgcaaagagtagctttttgtacttttattactgagagatcttcatatacttcattttttaatataaataattttaataaattttattttcttatattctgctttttatacatttcagtgctctgcatacattttaaattatgaatgtcgtgcactggcaatgctattttagagtctgcagagaagagaaagcatgttgcttaaacatccttccccagcaccagctattggtgtacctataatttaagaaatagtctatgtaaagtcacaaattaatgaaaaaaattcgcatgaaaatgacagataacactgtagttcctaaaaaaaaaattaaatgcataagcataaggtagaaattaaaataacaaaattgtctacagcttcttactaagtttttaaaattattcataaaatgcagacatttttggtgaatgtttagccatttttaatattaataaattgatgttaagtgtttgattcagagatgtctgctcttttaaattatatataaggaaaaaaaatagcctgccttgggacaggtgtgtaatgttagtgtgcatgactaatgtaagaaattgttattctactaatatttacttgtgattgtgtgacaagtgtgtttacagattattggttacacttcaatttacagggcataaacaatgattatctattactctgaactttatgattacatgttcttcagattacatgggattgtagttgggagttaccatgtaactcaaacataattaacatgtaattagtttacagattgtagggcatcacttcaattcaccaagcatgtagttctagcgcactagcatggcgccagccatgtacttacaatgtagttacagagtaattacatggtgatttttgcaatgtaaaataaagtgtttctgattattttctatgtaaaggaaccctctcctttccccttctggtccctgcgctttggtataatatatatacttctccatacacagacctctgcagaatgcaaaataaaacttgcagtgaatgaatttagcattttatgagagtgctgttggaaagacttgataattcaccccttttgttttgaagagttgaatcttctgttaaaaggtgatttaaaacttgaatgtgatgaattgtggcaagttaacttcaagttatgtgcaatacttatttcaaacttttgaaagatctttgcagtgtaattctttgtttttaattgcagacatttaaaaatgtcattttctactgttaagagtaatcctctttcttgctggtgtttctaaagaaaagaatcagaaatcaatctttctactaatgtaaatttgagattatttttaaaaatggaataaaagaggttttggtcatttgctttattttattattttaaagctactgtgattgatagcattgtaagaatcgggacaatattgtattcaactgttttattttttatatttttaaaatttaaagtataattagtttttataattttcatcagatttttgttatattttttggaagtgaaacttttagcaagtgggtgtctagtttttactaatccctaattttttttccagtgtattgctcatattatcagaaggaaaagttatttaagtatgtcagttaattgtactacttggctgaatttccatatagtttttactgtgtatggggaggttgtagtatttattatagcattttaaataagggtaattcattttttattaaagtcattttcacgttaagttcctatttttgtatgttctactcttaagttatataacacagttccttttttaaaagagttcatttgttgaagtgctagtgaaaaattaatgttattaaatagtttgcaaatgactatttataccagtatgcatataatttttaaatatttgtaatgtgagatgttgaatgaataaaacttttaactcagatttcttttaatatacttatttctttttaacacaagtagatgatgctttcttgactgggaatgtaacattttaaaatattaggaatatactgttcagctaatgcagcacaaaccaataggaaaaaatcttcagtcatataagtactgtggccagtgtgcattcttatgtaagcctataagcgtcggtgggtggttgtgtctttggcctgtactgttagttcacctgctgcctgccctgcagagttctttttatttgtagccttcaatatgtatacagggagtaagcccaggatctaagcattcagttatcagttgaaggccaaatgcccaacaaaagtgaaaaacccaatgtttagttaataatgaaagtccgtatctgggaggttcagttttgagtctttgtcaatgaatagtcttgatttgtggccacactaccaaagggcttgaaaacaagtctcttttgacttccaattcccagttcctccatagaccttaatgtcataggatacggtgtgtgggattataatctctatggcatgtcaattgaaaatattatctttgatttgatccattaatcatgtggactaccaagtgctgtaatgtgttagtatttatattttaaactgcattctcaaacttttaacataaggatttattataacaaaatataacactgagaata

I/We claim:

1. A method for developing a plurality of candidate probes to identify a cell type in a mammalian subject, comprising:
(a) generating, with a detecting chip, a plurality of gene expressions for a standard sample of a mammalian subject,
wherein the standard sample is a cell of a known tissue;
(b) comparing, with a processing module, the plurality of gene expressions to generate a comparison result; and
(c) developing, based on the comparison result, an array containing a plurality of selected probes, wherein the plurality of selected probes can bind a plurality of polynucleotide sequences selected from any one of SEQ ID No.1 to 652 or from any fragment of SEQ ID No.1 to 652,
wherein the detecting chip is electrically connected to the processing module.

2. The method according to claim 1, wherein a number of the plurality of selected probes is about 200.

3. The method according to claim 1, wherein a number of the plurality of selected probes is about 100.

4. The method according to claim 1, wherein a number of the plurality of selected probes is about 50-60.

5. The method according to claim 1, wherein a number of the plurality of selected probes is about 25-35.

6. The method according to claim 1, wherein a length of the plurality of selected probes is at least 15 nucleotides.

7. The method according to claim 1, wherein the standard sample is not diagnosed with a selected disease, disorder, genetic disorder or any combination thereof.

8. The method according to claim 1, wherein the mammalian subj ect is diagnosed with a selected disease, disorder, genetic disorder or any combination thereof.

9. The method according to claim 1, wherein the standard sample is blood, blood plasma, serum, urine, tissue, cells, organs, seminal fluids or any combination thereof.

10. The method according to claim 1, wherein step (b) does not include: comparing the plurality of gene expressions for the standard sample with an abnormal sample of a subject diagnosed with a selected disease, disorder, genetic disorder or any combination thereof.

11. The method according to claim 1, wherein in step (c), the array is developed by applying the following: Pearson's correlation, Spearman's rank correlation, Kendall, k-means, Mahalanobis distance, Hamming distance, Levenshtein distance, Euclidean distances or any combination thereof.

12. The method according to claim 1, wherein step (c) further includes:
(c1) analyzing a correlation factor between an expression of a selected sequence of the plurality of the selected probes and an expression of the plurality of polynucleotide sequences selected from any one of SEQ ID No.1 to 652 or from any fragment of SEQ ID No.1 to 652.

13. The method according to claim 12, wherein the correlation factor includes binding affinity.

14. A method for characterizing a cell type in a mammalian subject, comprising:
(a′) detecting, with a detection chip that contains the plurality of selected probes as in any one of claims 1-5, an expression level of a test sample array obtained from a mammalian subject diagnosed with a selected disease, disorder, genetic disorder,
wherein a plurality of selected probes can bind the plurality of polynucleotide sequence selected from any one of SEQ ID No.1 to 652 or from any fragment of SEQ ID No.1 to 652 as in any one of claims 1-5;
(b′) analyzing, with a processing module, the test sample based on the detected expression level to generate a score for the test sample; and
(c′) predicting, with the processing module, a cell type for the test sample based on the score for the test sample.

15. The method according to claim 14, wherein the score for the test sample is calculated based on a similarity or dissimilarity degree.

16. The method according to claim 15, wherein the cell type for the test sample is characterized as a normal/benign tumor cell when the similarity degree is >about 80%.

17. The method according to claim 15, wherein the cell type for the test sample is characterized as a primary tumor cell when the similarity degree is about 30-80%.

18. The method according to claim 15, wherein the cell type for the test sample is characterized as a metastatic tumor cell when the similarity degree is <about 30%.

19. The method according to claim 15, wherein the cell type for the test sample is characterized as a normal/benign tumor cell when the dissimilarity degree is <about 20%.

20. The method according to claim 15, wherein the cell type for the test sample is characterized as a primary tumor cell when the dissimilarity degree is about 20-70%.

21. The method according to claim 15, wherein the cell type for the test sample is characterized as a metastatic tumor cell when the dissimilarity degree is >about 70%.

22. The method according to claim 14, wherein the selected disease, disorder or genetic disorder includes hematologic malignancies or solid tumors.

23. The method according to claim 14, therein in step (b′), the score is generated by applying the following: Pearson's correlation coefficient, Spearman's rank correlation coefficient, Kendall, Mahalanobis distance, Euclidean distances or any combination thereof.

24. The method according to claim 14, wherein the detecting chip includes a microarray, a next-generation sequencing device, a quantitative polymerase chain reaction (i.e., qPCR) and magnetic beads.
